(19) United States
(12) Patent Application Publication
(10) Pub. No.: US 2022/0256795 A1
(43) Pub. Date: Aug. 18, 2022

(54) GENETIC LOCI ASSOCIATED WITH DISEASE RESISTANCE IN SOYBEANS

(71) Applicant: Syngenta Crop Protection AG, Basel (CH)

(72) Inventors: Qingli Liu, Durham, NC (US); Robert Arthur Dietrich, Durham, NC (US); Thomas Joseph Curley, Jr., Durham, NC (US); John Daniel Hipskind, Durham, NC (US); Becky Welsh Breitinger, Durham, NC (US); John Luther Dawson, Durham, NC (US)

(73) Assignee: Syngenta Crop Protection AG, Basel (CH)

(21) Appl. No.: 17/631,268

(22) PCT Filed: Jul. 30, 2020
(86) PCT No.: PCT/US2020/044228

§ 371 Date: Jan. 28, 2022

Related U.S. Application Data
(60) Provisional application No. 62/881,008, filed on Jul. 31, 2019.

(51) Int. Cl. A01H 1/00; A01H 1/04; A01H 5/10; A01H 6/54; C12Q 1/6895

(52) U.S. Cl. CPC A01H 1/1255; A01H 1/045; C12Q 2600/13; A01H 6/542; C12Q 1/6895; A01H 5/10

(57) ABSTRACT

The present invention relates to methods and compositions for identifying, selecting and/or producing a disease resistant soybean plant or germplasm using markers, genes and chromosomal intervals derived from Glycine canescens P1440935, P1483193, P1595799, or a progeny thereof, or Glycine tomentella, or a progeny thereof. A soybean plant or germplasm that has been identified, selected and/or produced by any of the methods of the present invention is also provided. Disease resistant soybean seeds, plants and germplasms are also provided.

### FIELD OF THE INVENTION

[0001] The present invention relates to compositions and methods for identifying, selecting and producing enhanced disease and/or pathogen resistant soybean plants.

### STATEMENT REGARDING ELECTRONIC SUBMISSION OF A SEQUENCE LISTING

[0002] A Sequence Listing in ASCII text format, submitted under 37 C.F.R. § 1.821, entitled “81922-WO-REG-ORG-NAT-1_SequenceList_ST25” generated on 31 Jul. 2019 and filed via EFS- Web is provided in lieu of a paper copy. This Sequence Listing is hereby incorporated by reference into the specification for its disclosures.

### BACKGROUND

[0003] Plant pathogens are known to cause considerable damage to important crops, resulting in significant agricultural losses with widespread consequences for both the food supply and other industries that rely on plant materials. As such, there is a long felt need to reduce the incidence and/or impact of agricultural pathogens on crop production.

[0004] Several pathogens have been associated with damage to soybeans, which individually and collectively have the potential to cause significant yield losses in the United States and throughout the world. Exemplary pathogens include, but are not limited to fungi (e.g., genus Phytophthora and Asian Soybean rust Phakopsora pahyrhizi), nematodes (e.g., genus Meloidogyne, particularly, Meloidogyne javanica), and soybean stem canker. Given the significant threat to global food supplies that these pathogens present and the time and expense associated with treating soybean crops to prevent loss, new methods for producing pathogen resistant soybean cultivars are needed. What is needed is novel resistance genes (herein, “R-Genes”) that can be introduced into commercial soybean plants to control soybean pathogens

### SUMMARY OF THE INVENTION

[0005] This summary lists several embodiments of the presently disclosed subject matter, and in many cases lists variations of these embodiments.

[0006] Embodiments are disclosed of elite Glycine max plants, progeny plants, seeds, plant cells, or plant parts derived from a plant, having introduced into its genome a chromosomal interval from a Glycine canescens line selected from an accession line group consisting of PI440935, PI483193, PI595799 or a progeny thereof, wherein said chromosomal interval confers increased resistance to Asian soy rust (ASR) as compared to a control plant not comprising said chromosomal interval. In some embodiments, the chromosomal interval comprises SEQ ID NOs: 1, 2, or 3 or a portion of SEQ ID Nos: 1, 2, or 3. In some embodiments, the chromosomal interval comprises a SNP marker associated with increased ASR resistance wherein said SNP marker corresponds with any one of the favorable SNP markers as listed in Tables 1-3. The chromosomal interval may be derived from Glycine canescens chromosome 1, 2, 3, 4, 5, 6, 7, 8, 9, 10, 11, 12, 13, 14, 15, 16, 17, 18, 19, or 20. The chromosomal interval may correspond to a position within the Glycine canescens genome that corresponds to SEQ ID NOs: 1-3.

[0007] In further embodiments, plants of the disclosed invention show increased resistance, relative to a control plant, to any one of the stresses selected from: diseases (such as powdery mildew, Pythium ultimum, Phytophthora root rot, leaf spot, blast, brown spot, root-knot nematode, soybean cyst nematode, soybean vein necrosis virus, soybean stem canker, soybean sudden death syndrome, leaf and neck blast, rust, frogeye leaf spot, brown stem rot, Fusarium, or sheath blight); insect pests (such as whitefly, aphid, grey field slug, sugarcane borer, green bug, or aphid); abiotic stress (such as drought tolerance, flooding, high level of salinity, heavy metal, aluminum, manganese, cadmium, zinc, UV-B, boron, iron deficiency chlorosis or cold tolerance (i.e. extreme temperatures)).

[0008] Embodiments are also disclosed for an elite soybean plant comprising an ASR resistant allele which confers increased resistance to ASR, and wherein the ASR allele comprises at least one single nucleotide polymorphism (SNP) selected from the group of “favorable” SNPs described in any one of Tables 1-3. The elite soybean plant may comprise a chromosomal interval from Glycine canescens comprising at least one favorable SNP marker selected from any one of Tables 1-3. Further, the Glycine canescens may be any one of accession lines PI440935, PI483193, PI595799, or a progeny thereof.

[0009] Embodiments are also disclosed for a method for producing a Glycine max plant having increased resistance to ASR, the method comprising the steps of (a) Providing a Glycine canescens plant line, or progeny thereof comprising a chromosomal interval corresponding to any one of SEQ ID NOs 1-3; (b) Carrying out the embryo rescue method essentially as described in Example 3 or as described in U.S. Pat. No. 7,842,850; (c) Collecting the seeds resulting from the method of b) and regenerating the seeds of c) into plants.

[0010] Embodiments are also disclosed for a method of identifying or selecting a soybean plant having a ASR resistance allele derived from Glycine canescens, the method comprising the steps of: Isolating a nucleic acid from a soybean plant; Detecting in the nucleic acid the presence of a molecular marker that associates with increased ASR resistance, wherein the molecular marker is located within 20 cM, 10 cM, ScM, 1 cM, 0.5 cM of a marker as described in any one of Tables 1-3; and thereby Identifying or selecting a soybean plant having a ASR resistance allele derived from Glycine canescens.

[0011] Embodiments are also disclosed of a method of identifying or selecting a soybean plant having a ASR resistance allele derived from Glycine tomentella, the method comprising the steps of: isolating a nucleic acid from a soybean plant; detecting in the nucleic acid the presence of a molecular marker that associates with increased ASR resistance wherein the molecular marker is located within an interval corresponding to SEQ ID NO: 4 or SEQ ID NO: 5; and identifying or selecting a soybean plant having an ASR resistance allele derived from Glycine tomentella.

[0012] In some embodiments, a plant, progeny plant, or plant part of the species Glycine max is disclosed, wherein a portion of a genome of the plant is obtained from a wild glycine species through the use of chemically induced chromosome doubling, and wherein said portion confers the plant with increased resistance to ASR as compared to a control plant not comprising the portion.

[0013] In other embodiments, a plant, progeny plant, or plant part of the species Glycine max is disclosed, wherein a genome of the plant comprises a chromosomal interval that confers increased resistance to ASR as compared to a control plant not comprising the interval, wherein said chromosomal interval is introduced into the plant from a wild glycine species, and wherein said plant with said chromosomal interval is obtained through chemically induced chromosomal doubling. The chromosomal interval may be derived from Glycine tomentella or canescens.

[0014] Thus, it is an object of the presently disclosed subject matter to provide methods for conveying pathogen resistance into non-resistant soybean germplasm, which object is achieved in whole or in part by the presently disclosed subject matter.

### BRIEF DESCRIPTION OF THE SEQUENCE LISTING

[0015] SEQ ID NO: 1 is a chromosomal interval derived from Glycine canescens line accession PI440935 referred to herein as “Scaffold 000056F”. Scaffold 000056F has been mapped to G. canescens chromosome 14. SEQ ID NO. 2 is a chromosomal interval derived from Glycine canescens line accession PI595799 referred to herein as “Scaffold 000090F”. Scaffold 000090F has been mapped to G. canescens chromosome 14. SEQ ID NO: 3 is a chromosomal interval derived from Glycine canescens line accession PI 483193 referred to herein as “Scaffold 132F”. Scaffold 132F has been mapped to G. canescens chromosome 14. These chromosomal intervals or portions thereof may be introduced (i.e. introgressed through use of embryo rescue and/or marker assisted breeding (MAB)) into Glycine max lines to create Glycine max lines resistant to disease (e.g. Asian Soybean Rust (ASR)). Tables 1-3 indicate single nucleotide polymorphisms (SNP) within SEQ ID NOs 1-3 that associate with ASR resistance. Table 1 displays SNP associations for SEQ ID NO: 1 (Scaffold 000056F) and Table 2 displays SNP associations for SEQ ID NO: 2 (Scaffold 000090F). Table 3 displays SNP associations for SEQ ID NO. 3 (Scaffold 132F) All alleles for the SNPs identified in Tables 1-3 were determined to be significantly linked with resistance or susceptibility (p<0.05).

[0016] SEQ ID NO: 4 is a chromosomal intervals derived from Glycine tomentella line accession PI509501 referred to herein as “Scaffold 4269. SEQ ID NO: 5 is a chromosomal intervals derived from Glycine tomentella line accession PI509501 referred to herein as “Scaffold 1509”. Scaffolds 4269 and 1509 have been mapped to G. tomentella chromosome 14. These chromosomal intervals or portions thereof may be introduced (i.e. introgressed through use of embryo rescue and/or marker assisted breeding (MAB)) into Glycine max lines to create Glycine max lines resistant to disease (e.g. Asian Soybean Rust (ASR)).

Lengthy table referenced here
US20220256795A1-20220818-T00001
Please refer to the end of the specification for access instructions.

Lengthy table referenced here
US20220256795A1-20220818-T00002
Please refer to the end of the specification for access instructions.

Lengthy table referenced here
US20220256795A1-20220818-T00003
Please refer to the end of the specification for access instructions.

[0017] It is well known in the art that given the sequence and the SNP allele associated with a given trait (e.g. ASR resistance), one having ordinary skill in the art could develop oligonucleotide primers and use said primers to identify plants carrying any one of the chromosomal intervals depicted in SEQ ID NOs 1-3. A TAQMAN® assay (e.g. generally a two-step allelic discrimination assay or similar), a KASP™ assay (generally a one-step allelic discrimination assay defined below or similar), or both can be employed to assay the SNPs as disclosed herein. In an exemplary two-step assay, a forward primer, a reverse primer, and two assay probes (or hybridization oligos) are employed. The forward and reverse primers are employed to amplify genetic loci that comprise SNPs that are associated with ASR resistance loci. The particular nucleotides that are present at the SNP positions are then assayed using the assay primers (which in some embodiments are differentially labeled with, for example, fluorophores to permit distinguishing between the two assay probes in a single reaction), which in each pair differ from each other with respect to the nucleotides that are present at the SNP position (although it is noted that in any given pair, the probes can differ in their 5′ or 3′ ends without impacting their abilities to differentiate between nucleotides present at the corresponding SNP positions). In some embodiments, the assay primers and the reaction conditions are designed such that an assay primer will only hybridize to the reverse complement of a 100% perfectly matched sequence, thereby permitting identification of which allele(s) is/are present based upon detection of hybridizations.

[0018] Compositions and methods for identifying, selecting and producing Glycine plants (including wild Glycines and Glycine max lines) with enhanced disease resistance are provided. Disease resistant soybean plants and germplasms are also provided.

[0019] In some embodiments, methods of identifying a disease resistant soybean plant or germplasm are provided. Such methods may comprise detecting, in the soybean plant or germplasm, a genetic loci or molecular marker (e.g. SNP or a Quantitative Trait Loci (QTL)) associated with enhanced disease resistance, in particular ASR resistance. In some embodiments the genetic loci or molecular marker associates with the presence of a chromosomal interval comprising the nucleotide sequence or a portion thereof of SEQ ID NOs 1-3.

[0020] In some embodiments, methods of producing a disease resistant soybean plant are provided. Such methods may comprise detecting, in a soybean germplasm, the presence of a genetic loci and/or a genetic marker associated with enhanced pathogen resistance (e.g. ASR) and producing a progeny plant from said soybean germplasm.

[0021] In some embodiments, methods of selecting a disease resistant soybean plant or germplasm are provided. Such methods may comprise crossing a first soybean plant or germplasm with a second soybean plant or germplasm, wherein the first soybean plant or germplasm comprises a genetic loci derived from soybean Glycine canescens accession PI440935, PI483193, PI595799, or a progeny or seed thereof comprising any one of SEQ ID NOs 1, 2, 3 or a portion thereof associated with enhanced disease resistance and/or tolerance, and selecting a progeny plant or germplasm that possesses the genetic loci.

[0022] In some embodiments, methods of introgressing a genetic loci derived from soybean accession number PI440935, PI483193, PI595799 or a progeny thereof associated with enhanced pathogen resistance into a soybean plant or germplasm are provided. Such methods may comprise crossing a first soybean plant or germplasm comprising a chromosomal interval derived from soybean accession number PI440935, PI483193, PI595799, or a progeny thereof associated with enhanced pathogen resistance with a second soybean plant or germplasm that lacks said genetic loci and optionally repeatedly backcrossing progeny plants comprising said genetic allele with the second soybean plant or germplasm to produce a soybean plant (e.g. Glycine max) or germplasm with enhanced pathogen resistance comprising the chromosomal interval derived from soybean accession number PI440935, PI483193, PI595799, or a progeny thereof associated with enhanced pathogen resistance. Progeny comprising the chromosomal interval associated with enhanced pathogen resistance may be identified by detecting, in their genomes, the presence of a marker associated with said chromosomal interval derived from soybean accession number PI440935, PI483193, PI595799, or a progeny thereof wherein said chromosomal interval comprises SEQ ID NOs 1-3 or a portion thereof. R-Genes from PI440935, PI483193, PI595799, or a progeny thereof can be introgressed into a Glycine max line through the use of embryo rescue methods known by those skilled in the art for example as is disclosed in U.S. Pat. No. 7,842,850 herein incorporated by reference and through methods as described in the working Examples herein.

[0023] Soybean plants and/or germplasms identified, produced or selected by the methods of this invention are also provided, as are any progeny and/or seeds derived from a soybean plant or germplasm identified, produced or selected by these methods. In one embodiment a molecular markers associating with the presence of a chromosomal intervals depicted in any one of SEQ ID NOs 1-3 may be used to identify or select for plant lines resistant to ASR. Further said molecular markers may be located within 20 cM, 10 cM, 5 cM, 4 cM, 3 cM, 2 cM, 1 cM of said chromosomal interval. In another embodiment, said molecular marker may be located within 20 cM, 10 cM, 5 cM, 4 cM, 3 cM, 2cM, 1cM of any SNP markers associated with ASR as described in any one of Tables 1-3.

[0024] Non-naturally occurring soybean seeds, plants and/or germplasms comprising one or genetic loci derived from soybean plant accession number PI440935, PI483193, PI595799, or a progeny thereof associated with enhanced pathogen resistance (e.g. ASR, Cyst Nematode, Phytopthora, brown stem rot etc.) are also provided.

[0025] A marker associated with enhanced pathogen resistance may comprise, consist essentially of or consist of a single allele or a combination of alleles at one or more genetic loci derived from PI440935, PI483193, PI595799, or a progeny thereof that associate with enhanced pathogen resistance. In one embodiment the marker is within a chromosomal interval as described by any one of SEQ ID NOs 1-3.

[0026] The foregoing and other objects and aspects of the present invention are explained in detail in the drawings and specification set forth below.

### BRIEF DESCRIPTION OF THE DRAWINGS

[0027] FIG. 1 shows the screening of Wild Glycine lines for rust resistance against a panel of 16 rust isolates.

[0028] FIG. 2 illustrates the rust rating scale used to measure plant phenotype.

[0029] FIG. 3 shows a depiction of Glycine canescens (PI440935) SNPs associated with ASR Resistance.

[0030] FIG. 4 is a marker association map for Glycine canescens (PI440935) where bands indicate regions/intervals of respective chromosomes associated with ASR resistance.

[0031] FIG. 5 shows a mapping interval on scaffold 000056F associated with ASR resistance.

### DETAILED DESCRIPTION OF THE INVENTION

[0032] The presently disclosed subject matter relates at least in part to the identification of a genomic region (i.e. chromosomal interval) derived from Glycine canescens accession line PI440935, PI483193, PI595799, or a progeny thereof associated with enhanced pathogen resistance (e.g., resistance to Asian soy rust (ASR) or Soybean cyst nematode (SCN)). As such, said chromosomal interval from PI440935, PI483193, PI595799, or a progeny thereof, may be introgressed into Glycine max lines via somatic embryo rescue (see for example U.S. Patent Publication 2007/0261139 and examples herein) or through the use of a Glycine max donor line having introgressed into its genome the genetic region from PI440935, PI483193, PI595799, or a progeny thereof wherein the region comprises SEQ ID NO: 1-3 or a portion thereof where presence of said genetic region is associated with increased soybean disease resistance to, for example, ASR, SCN, Stem termination, Stem Canker, Bacterial pustule, root knot nematode, brown stem rot, Frogeye leaf spot, or phytopthora. In another embodiment, a chromosomal interval derived from PI440935, PI483193, PI595799, or a progeny thereof is introduced into a Glycine max line not comprising said chromosomal interval wherein said introduction confers in the Glycine max line or it's progeny increased resistances to disease (e.g. ASR) wherein the said chromosome interval is derived from chromosome 1, 2, 3, 4, 5, 6, 7, 8, 9, 10, 11, 12, 13, 14, 15, 16, 17, 18, 19, or chromosome 20 of Glycine canescens and further wherein said chromosomal interval comprises at least one allele that associates with the trait of increased disease resistance wherein said allele is any one of the alleles respectively selected from any one of Tables 1-3.

[0033] All references listed below, as well as all references cited in the instant disclosure, including but not limited to all patents, patent applications and publications thereof, scientific journal articles, and database entries (e.g., GENBANK® database entries and all annotations available therein) are incorporated herein by reference in their entireties to the extent that they supplement, explain, provide a background for, or teach methodology, techniques, and/or compositions employed herein.

### Definitions

[0034] Unless defined otherwise, all technical and scientific terms used herein have the same meaning as commonly understood to one of ordinary skill in the art to which the presently disclosed subject matter belongs.

[0035] Although the following terms are believed to be well understood by one of ordinary skill in the art, the following definitions are set forth to facilitate understanding of the presently disclosed subject matter.

[0036] As used herein, the terms “a” or “an” or “the” may refer to one or more than one. For example, “a” marker can mean one marker or a plurality of markers.

[0037] As used herein, the term “and/or” refers to and encompasses any and all possible combinations of one or more of the associated listed items, as well as the lack of combinations when interpreted in the alternative (“or”).

[0038] As used herein, the term “about,” when used in reference to a measurable value such as an amount of mass, dose, time, temperature, and the like, is meant to encompass variations of 20%, 10%, 5%, 1%, 0.5%, or even 0.1% of the specified amount.

[0039] The term “consists essentially of” (and grammatical variants thereof), as applied to a polynucleotide sequence of this invention, means a polynucleotide sequence that consists of both the recited sequence (e.g., SEQ ID NO) and a total of ten or less (e.g., 1, 2, 3, 4, 5, 6, 7, 8, 9, or 10) additional nucleotides on the 5′ and/or 3′ ends of the recited sequence such that the function of the polynucleotide is not materially altered. The total of ten or less additional nucleotides includes the total number of additional nucleotides on both ends added together. The term “materially altered,” as applied to polynucleotides of the invention, refers to an increase or decrease in ability to express the polynucleotide sequence of at least about 50% or more as compared to the expression level of a polynucleotide sequence consisting of the recited sequence.

[0040] As used herein, the term “wild glycine” refers to a Glycine canescens plant.

[0041] As used herein, the term “allele” refers to one of two or more different nucleotides or nucleotide sequences that occur at a specific locus.

[0042] A marker is “associated with” a trait when it is linked to it and when the presence of the marker is an indicator of whether and/or to what extent the desired trait or trait form will occur in a plant/germplasm comprising the marker. Similarly, a marker is “associated with” an allele when it is linked to it and when the presence of the marker is an indicator of whether the allele is present in a plant/germplasm comprising the marker. For example, “a marker associated with enhanced pathogen resistance” refers to a marker whose presence or absence can be used to predict whether and/or to what extent a plant will display a pathogen resistant phenotype.

[0043] As used herein, the terms “backcross” and “backcrossing” refer to the process whereby a progeny plant is repeatedly crossed back to one of its parents. In a backcrossing scheme, the “donor” parent refers to the parental plant with the desired gene or locus to be introgressed. The “recipient” parent (used one or more times) or “recurrent” parent (used two or more times) refers to the parental plant into which the gene or locus is being introgressed. For example, see Ragot, M. et al. Marker- assisted Backcrossing: A Practical Example, in TECHNIQUES ET UTILISATIONS DES MARQUEURS MOLECULAIRES LES COLLOQUES, Vol. 72, pp. 45-56 (1995); and Openshaw et al., Marker-assisted Selection in Backcross Breeding, in PROCEEDINGS OF THE SYMPOSIUM “ANALYSIS OF MOLECULAR MARKER DATA,” pp. 41-43 (1994). The initial cross gives rise to the F1 generation. The term “BC1” refers to the second use of the recurrent parent, “BC2” refers to the third use of the recurrent parent, and so on.

[0044] A centimorgan (“cM”) is a unit of measure of recombination frequency. One cM is equal to a 1% chance that a marker at one genetic locus will be separated from a marker at a second locus due to crossing over in a single generation.

[0045] As used herein, the term “chromosomal interval defined by and including,” used in reference to particular loci and/or alleles, refers to a chromosomal interval delimited by and encompassing the stated loci/alleles.

[0046] As used herein, the terms “cross” or “crossed” refer to the fusion of gametes via pollination to produce progeny (e.g., cells, seeds or plants). The term encompasses both sexual crosses (the pollination of one plant by another) and selfing (self-pollination, e.g., when the pollen and ovule are from the same plant). The term “crossing” refers to the act of fusing gametes via pollination to produce progeny.

[0047] As used herein, the terms “cultivar” and “variety” refer to a group of similar plants that by structural or genetic features and/or performance can be distinguished from other varieties within the same species.

[0048] As used herein, the terms “desired allele” and “allele of interest” are used interchangeably to refer to an allele associated with a desired trait. In some embodiments, a “desired allele” and/or “allele of interest” may be associated with either an increase or a decrease of or in a given trait, depending on the nature of the desired phenotype. In some embodiments, a “desired allele” and/or “allele of interest” may be associated with a change in morphology, color, etc.

[0049] As used herein, the terms “enhanced pathogen resistance” or “enhanced disease resistance” refers to an improvement, enhancement, or increase in a plant's ability to endure and/or thrive despite being infected with a disease (e.g. Asian soybean rust) as compared to one or more control plants (e.g., one or both of the parents, or a plant lacking a marker associated with enhanced pathogen resistance to respective pathogen/disease). Enhanced disease resistance includes any mechanism (other than whole-plant immunity or resistance) that reduces the expression of symptoms indicative of infection for a respective disease such as Asian soybean rust, soybean cyst nematode, Pytophthora, etc.

[0050] As used herein, the terms “elite” and “elite line” refer to any line that has resulted from breeding and selection for desirable agronomic performance. An elite line may be substantially homozygous. Numerous elite lines are available and known to those of skill in the art.

[0051] As used herein, the term “elite germplasm” refers to any germplasm that is derived from or is capable of giving rise to an elite plant.

[0052] As used herein, the terms “exotic,” “exotic line” and “exotic germplasm” refer to any plant, line or germplasm that is not elite. In general, exotic plants/germplasms are not derived from any known elite plant or germplasm, but rather are selected to introduce one or more desired genetic elements into a breeding program (e.g., to introduce novel alleles into a breeding program).

[0053] A “genetic map” is a description of genetic linkage relationships among loci on one or more chromosomes within a given species, generally depicted in a diagrammatic or tabular form. For each genetic map, distances between loci are measured by the recombination frequencies between them. Recombinations between loci can be detected using a variety of markers. A genetic map is a product of the mapping population, types of markers used, and the polymorphic potential of each marker between different populations. The order and genetic distances between loci can differ from one genetic map to another.

[0054] As used herein, the term “genotype” refers to the genetic constitution of an individual (or group of individuals) at one or more genetic loci, as contrasted with the observable and/or detectable and/or manifested trait (the phenotype). Genotype is defined by the allele(s) of one or more known loci that the individual has inherited from its parents. The term genotype can be used to refer to an individual's genetic constitution at a single locus, at multiple loci, or more generally, the term genotype can be used to refer to an individual's genetic make-up for all the genes in its genome. Genotypes can be indirectly characterized, e.g., using markers and/or directly characterized by nucleic acid sequencing.

[0055] As used herein, the term “germplasm” refers to genetic material of or from an individual (e.g., a plant), a group of individuals (e.g., a plant line, variety or family), or a clone derived from a line, variety, species, or culture. The germplasm can be part of an organism or cell, or can be separate from the organism or cell. In general, germplasm provides genetic material with a specific molecular makeup that provides a physical foundation for some or all of the hereditary qualities of an organism or cell culture. As used herein, germplasm may refer to seeds, cells (including protoplasts and calli) or tissues from which new plants may be grown, as well as plant parts that can be cultured into a whole plant (e.g., stems, buds, roots, leaves, etc.).

[0056] A “haplotype” is the genotype of an individual at a plurality of genetic loci, i.e., a combination of alleles. Typically, the genetic loci that define a haplotype are physically and genetically linked, i.e., on the same chromosome segment. The term “haplotype” can refer to polymorphisms at a particular locus, such as a single marker locus, or polymorphisms at multiple loci along a chromosomal segment.

[0057] As used herein, the term “heterozygous” refers to a genetic status wherein different alleles reside at corresponding loci on homologous chromosomes.

[0058] As used herein, the term “homozygous” refers to a genetic status wherein identical alleles reside at corresponding loci on homologous chromosomes.

[0059] As used herein, the term “hybrid” refers to a seed and/or plant produced when at least two genetically dissimilar parents are crossed.

[0060] As used herein, the term “inbred” refers to a substantially homozygous plant or variety. The term may refer to a plant or variety that is substantially homozygous throughout the entire genome or that is substantially homozygous with respect to a portion of the genome that is of particular interest.

[0061] As used herein, the term “indel” refers to an insertion or deletion in a pair of nucleotide sequences, wherein a first sequence may be referred to as having an insertion relative to a second sequence or the second sequence may be referred to as having a deletion relative to the first sequence.

[0062] As used herein, the terms “introgression,” “introgressing” and “introgressed” refer to both the natural and artificial transmission of a desired allele or combination of desired alleles of a genetic locus or genetic loci from one genetic background to another. For example, a desired allele at a specified locus can be transmitted to at least one progeny via a sexual cross between two parents of the same species, where at least one of the parents has the desired allele in its genome. Alternatively, for example, transmission of an allele can occur by recombination between two donor genomes, e.g., in a fused protoplast, where at least one of the donor protoplasts has the desired allele in its genome. The desired allele may be a selected allele of a marker, a QTL, a transgene, or the like. Offspring comprising the desired allele can be repeatedly backcrossed to a line having a desired genetic background and selected for the desired allele, with the result being that the desired allele becomes fixed in the desired genetic background. For example, a marker associated with enhanced ASR tolerance may be introgressed from a donor into a recurrent parent that is not Disease resistant. The resulting offspring could then be repeatedly backcrossed and selected until the progeny possess the ASR tolerance allele(s) in the recurrent parent background.

[0063] As used herein, the term “linkage” refers to the degree with which one marker locus is associated with another marker locus or some other locus (for example, an ASR tolerance locus). The linkage relationship between a molecular marker and a phenotype may be given as a “probability” or “adjusted probability.” Linkage can be expressed as a desired limit or range. For example, in some embodiments, any marker is linked (genetically and physically) to any other marker when the markers are separated by less than about 50, 40, 30, 25, 20, or 15 map units (or cM).

[0064] In some aspects of the present invention, it is advantageous to define a bracketed range of linkage, for example, from about 10 cM and about 20 cM, from about 10 cM and about 30 cM, or from about 10 cM and about 40 cM. The more closely a marker is linked to a second locus, the better an indicator for the second locus that marker becomes. Thus, “closely linked loci” such as a marker locus and a second locus display an inter-locus recombination frequency of about 10%, 9%, 8%, 7%, 6%, 5%, 4%, 3%, or 2% or less. In some embodiments, the relevant loci display a recombination frequency of about 1% or less, e.g., about 0.75%, 0.5%, 0.25% or less. Two loci that are localized to the same chromosome, and at such a distance that recombination between the two loci occurs at a frequency of less than about 10% (e.g., about 9%, 8%, 7%, 6%, 5%, 4%, 3%, 2%, 1%, 0.75%, 0.5%, or 0.25%, or less) may also be said to be “proximal to” each other. Since one cM is the distance between two markers that show a 1% recombination frequency, any marker is closely linked (genetically and physically) to any other marker that is in close proximity, e.g., at or less than about 10 cM distant. Two closely linked markers on the same chromosome may be positioned about 9, 8, 7, 6, 5, 4, 3, 2, 1, 0.75, 0.5 or 0.25 cM or less from each other.

[0065] As used herein, the term “linkage disequilibrium” refers to a non-random segregation of genetic loci or traits (or both). In either case, linkage disequilibrium implies that the relevant loci are within sufficient physical proximity along a length of a chromosome so that they segregate together with greater than random (i.e., non-random) frequency (in the case of co-segregating traits, the loci that underlie the traits are in sufficient proximity to each other). Markers that show linkage disequilibrium are considered linked Linked loci co-segregate more than 50% of the time, e.g., from about 51% to about 100% of the time. In other words, two markers that co-segregate have a recombination frequency of less than 50% (and, by definition, are separated by less than 50 cM on the same chromosome). As used herein, linkage can be between two markers, or alternatively between a marker and a phenotype. A marker locus can be “associated with” (linked to) a trait, e.g., Asian Soybean Rust (herein ‘ASR’). The degree of linkage of a molecular marker to a phenotypic trait is measured, e.g., as a statistical probability of co-segregation of that molecular marker with the phenotype.

[0066] Linkage disequilibrium is most commonly assessed using the measure r², which is calculated using the formula described by Hill and Robertson, Theor. Appl. Genet. 38:226 (1968). When r²=1, complete linkage disequilibrium exists between the two marker loci, meaning that the markers have not been separated by recombination and have the same allele frequency. Values for r² above ⅓ indicate sufficiently strong linkage disequilibrium to be useful for mapping. Ardlie et al., Nature Reviews Genetics 3:299 (2002). Hence, alleles are in linkage disequilibrium when r² values between pairwise marker loci are greater than or equal to about 0.33, 0.4, 0.5, 0.6, 0.7, 0.8, 0.9, or 1.0.

[0067] As used herein, the term “linkage equilibrium” describes a situation where two markers independently segregate, i.e., sort among progeny randomly. Markers that show linkage equilibrium are considered unlinked (whether or not they lie on the same chromosome).

[0068] A “locus” is a position on a chromosome where a gene or marker or allele is located. In some embodiments, a locus may encompass one or more nucleotides.

[0069] As used herein, the terms “marker” and “genetic marker” are used interchangeably to refer to a nucleotide and/or a nucleotide sequence that has been associated with a phenotype, trait or trait form. In some embodiments, a marker may be associated with an allele or alleles of interest and may be indicative of the presence or absence of the allele or alleles of interest in a cell or organism. A marker may be, but is not limited to, an allele, a gene, a haplotype, a restriction fragment length polymorphism (RFLP), a simple sequence repeat (SSR), random amplified polymorphic DNA (RAPD), cleaved amplified polymorphic sequences (CAPS) (Rafalski and Tingey, Trends in Genetics 9:275 (1993)), an amplified fragment length polymorphism (AFLP) (Vos et al., Nucleic Acids Res. 23:4407 (1995)), a single nucleotide polymorphism (SNP) (Brookes, Gene 234:177 (1993)), a sequence-characterized amplified region (SCAR) (Paran and Michelmore, Theor. Appl. Genet. 85:985 (1993)), a sequence-tagged site (STS) (Onozaki et al., Euphytica 138:255 (2004)), a single-stranded conformation polymorphism (SSCP) (Orita et al., Proc. Natl. Acad. Sci. USA 86:2766 (1989)), an inter-simple sequence repeat (ISSR) (Blair et al., Theor. Appl. Genet. 98:780 (1999)), an inter- retrotransposon amplified polymorphism (IRAP), a retrotransposon-microsatellite amplified polymorphism (REMAP) (Kalendar et al., Theor. Appl. Genet. 98:704 (1999)), a chromosome interval, or an RNA cleavage product (such as a Lynx tag). A marker may be present in genomic or expressed nucleic acids (e.g., ESTs). The term marker may also refer to nucleic acids used as probes or primers (e.g., primer pairs) for use in amplifying, hybridizing to and/or detecting nucleic acid molecules according to methods well known in the art. A large number of soybean molecular markers are known in the art, and are published or available from various sources, such as the SoyBase internet resource.

[0070] Markers corresponding to genetic polymorphisms between members of a population can be detected by methods well-established in the art. These include, e.g., nucleic acid sequencing, hybridization methods, amplification methods (e.g., PCR-based sequence specific amplification methods), detection of restriction fragment length polymorphisms (RFLP), detection of isozyme markers, detection of polynucleotide polymorphisms by allele specific hybridization (ASH), detection of amplified variable sequences of the plant genome, detection of self-sustained sequence replication, detection of simple sequence repeats (SSRs), detection of single nucleotide polymorphisms (SNPs), and/or detection of amplified fragment length polymorphisms (AFLPs). Well established methods are also known for the detection of expressed sequence tags (ESTs) and SSR markers derived from EST sequences and randomly amplified polymorphic DNA (RAPD).

[0071] A “marker allele,” also described as an “allele of a marker locus,” can refer to one of a plurality of polymorphic nucleotide sequences found at a marker locus in a population that is polymorphic for the marker locus. “Marker-assisted selection” (MAS) is a process by which phenotypes are selected based on marker genotypes. In some embodiments, marker genotypes are used to identify plants that will be selected for a breeding program or for planting. In some embodiments, marker genotypes are used to identify plants that will not be selected for a breeding program or for planting (i.e., counter-selected plants), allowing them to be removed from the breeding/planting population.

[0072] As used herein, the terms “marker locus” and “marker loci” refer to a specific chromosome location or locations in the genome of an organism where a specific marker or markers can be found. A marker locus can be used to track the presence of a second linked locus, e.g., a linked locus that encodes or contributes to expression of a phenotypic trait. For example, a marker locus can be used to monitor segregation of alleles at a locus, such as a QTL or single gene, that are genetically or physically linked to the marker locus.

[0073] As used herein, the terms “marker probe” and “probe” refer to a nucleotide sequence or nucleic acid molecule that can be used to detect the presence of one or more particular alleles within a marker locus (e.g., a nucleic acid probe that is complementary to all of or a portion of the marker or marker locus, through nucleic acid hybridization). Marker probes comprising about 8, 10, 15, 20, 30, 40, 50, 60, 70, 80, 90, 100 or more contiguous nucleotides may be used for nucleic acid hybridization. Alternatively, in some aspects, a marker probe refers to a probe of any type that is able to distinguish (i.e., genotype) the particular allele that is present at a marker locus.

[0074] As used herein, the terms “molecular marker” or “genetic marker” may be used to refer to a genetic marker, as defined above, or an encoded product thereof (e.g., a protein) used as a point of reference when identifying a linked locus. A molecular marker can be derived from genomic nucleotide sequences or from expressed nucleotide sequences (e.g., from a spliced RNA, a cDNA, etc.). The term also refers to nucleotide sequences complementary to or flanking the marker sequences, such as nucleotide sequences used as probes and/or primers capable of amplifying the marker sequence. Nucleotide sequences are “complementary” when they specifically hybridize in solution, e.g., according to Watson-Crick base pairing rules. Some of the markers described herein are also referred to as hybridization markers when located on an indel region. This is because the insertion region is, by definition, a polymorphism vis-ã-vis a plant without the insertion. Thus, the marker need only indicate whether the indel region is present or absent. Any suitable marker detection technology may be used to identify such a hybridization marker, e.g., SNP technology is used in the examples provided herein.

[0075] A “non-naturally occurring variety of soybean” is any variety of soybean that does not naturally exist in nature. A “non-naturally occurring variety of soybean” may be produced by any method known in the art, including, but not limited to, transforming a soybean plant or germplasm, transfecting a soybean plant or germplasm and crossing a naturally occurring variety of soybean with a non-naturally occurring variety of soybean. In some embodiments, a “non-naturally occurring variety of soybean” may comprise one of more heterologous nucleotide sequences. In some embodiments, a “non-naturally occurring variety of soybean” may comprise one or more non- naturally occurring copies of a naturally occurring nucleotide sequence (i.e., extraneous copies of a gene that naturally occurs in soybean). In some embodiments, a “non-naturally occurring variety of soybean” may comprise a non-natural combination of two or more naturally occurring nucleotide sequences (i.e., two or more naturally occurring genes that do not naturally occur in the same soybean, for instance genes not found in Glycine max lines).

[0076] As used herein, the terms “phenotype,” “phenotypic trait” or “trait” refer to one or more traits and/or manifestations of an organism. The phenotype can be a manifestation that is observable to the naked eye, or by any other means of evaluation known in the art, e.g., microscopy, biochemical analysis, or an electromechanical assay. In some cases, a phenotype or trait is directly controlled by a single gene or genetic locus, i.e., a “single gene trait.” In other cases, a phenotype or trait is the result of several genes. It is noted that, as used herein, the term “disease resistant phenotype” takes into account environmental conditions that might affect the respective disease such that the effect is real and reproducible.

[0077] As used herein, the term “plant” may refer to a whole plant, any part thereof, or a cell or tissue culture derived from a plant. Thus, the term “plant” can refer to any of: whole plants, plant components or organs (e.g., roots, stems, leaves, buds, flowers, pods, etc.), plant tissues, seeds and/or plant cells. A plant cell is a cell of a plant, taken from a plant, or derived through culture from a cell taken from a plant. Thus, the term “soybean plant” may refer to a whole soybean plant, one or more parts of a soybean plant (e.g., roots, root tips, stems, leaves, buds, flowers, pods, seeds, cotyledons, etc.), soybean plant cells, soybean plant protoplasts and/or soybean plant calli.

[0078] As used herein, the term “polymorphism” refers to a variation in the nucleotide sequence at a locus, where said variation is too common to be due merely to a spontaneous mutation. A polymorphism can be a single nucleotide polymorphism (SNP) or an insertion/deletion polymorphism, also referred to herein as an “indel.” Additionally, the variation can be in a transcriptional profile or a methylation pattern. The polymorphic site or sites of a nucleotide sequence can be determined by comparing the nucleotide sequences at one or more loci in two or more germplasm entries.

[0079] As used herein, the term “population” refers to a genetically heterogeneous collection of plants sharing a common genetic derivation.

[0080] As used herein, the terms “progeny” and “progeny plant” refer to a plant generated from a vegetative or sexual reproduction from one or more parent plants. A progeny plant may be obtained by cloning or selfing a single parent plant, or by crossing two parental plants.

[0081] As used herein, the term “reference sequence” refers to a defined nucleotide sequence used as a basis for nucleotide sequence comparison. The reference sequence for a marker, for example, is obtained by genotyping a number of lines at the locus or loci of interest, aligning the nucleotide sequences in a sequence alignment program, and then obtaining the consensus sequence of the alignment. Hence, a reference sequence identifies the polymorphisms in alleles at a locus. A reference sequence may not be a copy of an actual nucleic acid sequence from any particular organism; however, it is useful for designing primers and probes for actual polymorphisms in the locus or loci.

[0082] As used herein, the terms “disease tolerance” and “Disease resistant” refer to a plant's ability to endure and/or thrive despite being infected with a respective disease. When used in reference to germplasm, the terms refer to the ability of a plant that arises from that germplasm to endure and/or thrive despite being infected with a respective disease. In some embodiments, infected Disease resistant soybean plants may yield as well (or nearly as well) as uninfected soybean plants. In general, a plant or germplasm is labeled as “Disease resistant” if it displays “enhanced pathogen resistance.”

[0083] An “unfavorable allele” of a marker is a marker allele that segregates with the unfavorable plant phenotype, therefore providing the benefit of identifying plants that can be removed from a breeding program or planting.

[0084] “PI440935, PI483193, PI595799” refers to Glycine canescens accession numbers PI440935, PI483193, and PI595799 respectively.

### Genetic Mapping

[0085] Genetic loci correlating with particular phenotypes, such as disease resistance, can be mapped in an organism's genome. By identifying a marker or cluster of markers that co-segregate with a trait of interest, the breeder is able to rapidly select a desired phenotype by selecting for the proper marker (a process called marker-assisted selection, or MAS). Such markers may also be used by breeders to design genotypes in silico and to practice whole genome selection.

[0086] The present invention provides markers associated with enhanced disease resistance. Detection of these markers and/or other linked markers can be used to identify, select and/or produce Disease resistant plants and/or to eliminate plants that are not Disease resistant from breeding programs or planting.

### Glycine Canescens Genetic Loci Associated with Enhanced Disease Resistance

[0087] Markers associated with enhanced disease resistance are identified herein (see Tables 1-3). A marker of the present invention may comprise a single allele or a combination of alleles at one or more genetic loci (for example, any combination of a marker from any combination of marker alleles listed in Tables 1-3). For example, the marker may comprise one or more marker alleles located within a first chromosomal interval (e.g. SEQ ID NO: 1) and one or more marker alleles located within a second chromosomal interval (e.g. SEQ ID NO: 2).

[0088] Markers of the present invention are described herein with respect to the positions of marker loci within chromosomal intervals comprising sequenced genomic DNA of PI440935, PI483193, PI595799, or a progeny or seed thereof as depicted by any one of SEQ ID NOs 1-3, and as represented in Tables 1-3.

### Marker-Assisted Selection

[0089] Markers can be used in a variety of plant breeding applications. See, e.g., Staub et al., Hortscience 31: 729 (1996); Tanksley, Plant Molecular Biology Reporter 1: 3 (1983). One of the main areas of interest is to increase the efficiency of backcrossing and introgressing genes using marker-assisted selection (MAS). In general, MAS takes advantage of genetic markers that have been identified as having a significant likelihood of co-segregation with a desired trait. Such markers are presumed to be in/near the gene(s) that give rise to the desired phenotype, and their presence indicates that the plant will possess the desired trait. Plants which possess the marker are expected to transfer the desired phenotype to their progeny.

[0090] A marker that demonstrates linkage with a locus affecting a desired phenotypic trait provides a useful tool for the selection of the trait in a plant population. This is particularly true where the phenotype is hard to assay or occurs at a late stage in plant development. Since DNA marker assays are less laborious and take up less physical space than field phenotyping, much larger populations can be assayed, increasing the chances of finding a recombinant with the target segment from the donor line moved to the recipient line. The closer the linkage, the more useful the marker, as recombination is less likely to occur between the marker and the gene causing or imparting the trait. Having flanking markers decreases the chances that false positive selection will occur. The ideal situation is to have a marker within the causative gene itself, so that recombination cannot occur between the marker and the gene. Such a marker is called a “perfect marker.”

[0091] When a gene is introgressed by MAS, it is not only the gene that is introduced but also the flanking regions. Gepts, Crop Sci 42:1780 (2002). This is referred to as “linkage drag.” In the case where the donor plant is highly unrelated to the recipient plant, these flanking regions carry additional genes that may code for agronomically undesirable traits. This “linkage drag” may also result in reduced yield or other negative agronomic characteristics even after multiple cycles of backcrossing into the elite soybean line. This is also sometimes referred to as “yield drag.” The size of the flanking region can be decreased by additional backcrossing, although this is not always successful, as breeders do not have control over the size of the region or the recombination breakpoints. Young et al., Genetics 120:579 (1998). In classical breeding, it is usually only by chance that recombinations that contribute to a reduction in the size of the donor segment are selected. Tanksley et al., Biotechnology 7: 257 (1989). Even after 20 backcrosses, one might find a sizeable piece of the donor chromosome still linked to the gene being selected. With markers, however, it is possible to select those rare individuals that have experienced recombination near the gene of interest. In 150 backcross plants, there is a 95% chance that at least one plant will have experienced a crossover within 1 cM of the gene, based on a single meiosis map distance. Markers allow for unequivocal identification of those individuals. With one additional backcross of 300 plants, there would be a 95% chance of a crossover within 1 cM single meiosis map distance of the other side of the gene, generating a segment around the target gene of less than 2 cM based on a single meiosis map distance. This can be accomplished in two generations with markers, while it would have required on average 100 generations without markers. See Tanksley et al., supra. When the exact location of a gene is known, flanking markers surrounding the gene can be utilized to select for recombinations in different population sizes. For example, in smaller population sizes, recombinations may be expected further away from the gene, so more distal flanking markers would be required to detect the recombination.

[0092] The availability of integrated linkage maps of the soybean genome containing increasing densities of public soybean markers has facilitated soybean genetic mapping and MAS.

[0093] Of all the molecular marker types, SNPs are the most abundant and have the potential to provide the highest genetic map resolution. Bhattramakki et al., Plant Molec. Biol. 48:539 (2002). SNPs can be assayed in a so-called “ultra-high-throughput” fashion because they do not require large amounts of nucleic acid and automation of the assay is straight-forward. SNPs also have the benefit of being relatively low-cost systems. These three factors together make SNPs highly attractive for use in MAS. Several methods are available for SNP genotyping, including but not limited to, hybridization, primer extension, oligonucleotide ligation, nuclease cleavage, mini-sequencing and coded spheres. Such methods have been reviewed in various publications: Gut, Hum. Mutat. 17:475 (2001); Shi, Clin. Chem. 47:164 (2001); Kwok, Pharmacogenomics 1:95 (2000); Bhattramakki and Rafalski, Discovery and application of single nucleotide polymorphism markers in plants, in PLANT GENOTYPING: THE DNA FINGERPRINTING OF PLANTS, CABI Publishing, Wallingford (2001). A wide range of commercially available technologies utilize these and other methods to interrogate SNPs, including Masscode™ (Qiagen, Germantown, Md.), Invader® (Hologic, Madison, Wis.), SnapShot® (Applied Biosystems, Foster City, Calif.), Taqman® (Applied Biosystems, Foster City, Calif.) and Beadarrays™ (Illumina, San Diego, Calif.).

[0094] A number of SNP alleles together within a sequence, or across linked sequences, can be used to describe a haplotype for any particular genotype. Ching et al., BMC Genet. 3:19 (2002); Gupta et al., (2001), Rafalski, Plant Sci. 162:329 (2002b). Haplotypes can be more informative than single SNPs and can be more descriptive of any particular genotype. For example, a single SNP may be allele “T” for a specific Disease resistant line or variety, but the allele “T” might also occur in the soybean breeding population being utilized for recurrent parents. In this case, a combination of alleles at linked SNPs may be more informative. Once a unique haplotype has been assigned to a donor chromosomal region, that haplotype can be used in that population or any subset thereof to determine whether an individual has a particular gene. The use of automated high throughput marker detection platforms known to those of ordinary skill in the art makes this process highly efficient and effective.

[0095] The markers of the present invention can be used in marker-assisted selection protocols to identify and/or select progeny with enhanced Asian soybean rust tolerance. Such methods can comprise, consist essentially of, or consist of crossing a first soybean plant or germplasm with a second soybean plant or germplasm, wherein the first soybean plant or germplasm comprises a chromosomal interval derived from PI440935, PI483193, PI595799, or a progeny thereof wherein said chromosomal interval corresponds with nucleotide base 1 to nucleotide base 5873075 of SEQ ID NO: 1 or wherein the chromosomal interval corresponds with nucleotide base 1 to nucleotide base 2442980 of SEQ ID NO: 2; or nucleotide base 1-2622791 of SEQ ID NO: 3; and selecting a progeny plant that possesses the marker. Either of the first and second soybean plants, or both, may be of a non-naturally occurring variety of soybean. In some embodiments, the second soybean plant or germplasm is of an elite variety of soybean. In some embodiments, the genome of the second soybean plant or germplasm is at least about 50%, 55%, 60%, 65%, 70%, 75%, 80%, 85%, 90%, 95%, 97%, 99% or 100% identical to that of an elite variety of soybean. In another embodiment, the first soybean plant comprises a chromosomal interval derived from PI440935, PI483193, PI595799, or a progeny thereof wherein said chromosomal interval corresponds with nucleotide base 1 to nucleotide base 5873075 of SEQ ID NO: 1 or nucleotide base 1 to nucleotide base 2442980 of SEQ ID NO: 2; or nucleotide base 1-2622791 of SEQ ID NO: 3; wherein the chromosome interval further comprises at least one allele as depicted in any one of respective Tables 1-3.

[0096] Methods for identifying and/or selecting a disease resistant soybean plant or germplasm may comprise, consist essentially of, or consist of detecting the presence of a marker associated with enhanced ASR tolerance. The marker may be detected in any sample taken from the plant or germplasm, including, but not limited to, the whole plant or germplasm, a portion of said plant or germplasm (e.g., a seed chip, a leaf punch disk or a cell from said plant or germplasm) or a nucleotide sequence from said plant or germplasm. Such a sample may be taken from the plant or germplasm using any present or future method known in the art, including, but not limited to, automated methods of removing a portion of endosperm with a sharp blade, drilling a small hole in the seed and collecting the resultant powder, cutting the seed with a laser and punching a leaf disk. The soybean plant may be of a non-naturally occurring variety of soybean. In some embodiments, the genome of the soybean plant or germplasm is at least about 50%, 55%, 60%, 65%, 70%, 75%, 80%, 85%, 90%, 95%, 97%, 99% or 100% identical to that of an elite variety of soybean.

[0097] In some embodiments, the marker detected in the sample may comprise, consist essentially of or consist of one or more marker alleles located within a chromosomal interval selected from the group consisting of:
[0098] 1) chromosomal interval derived from PI440935, PI483193, PI595799, or a progeny thereof wherein said chromosomal interval corresponds with nucleotide base 1 to nucleotide base 5873075 of SEQ ID NO: 1; or
[0099] 2) chromosomal interval derived from PI440935, PI483193, PI595799 or a progeny thereof wherein said chromosomal interval corresponds with nucleotide base 1 to nucleotide base 2442980 of SEQ ID NO: 2; or
[0100] 3) chromosomal interval derived from PI440935, PI483193, PI595799, or a progeny thereof wherein said chromosomal interval corresponds with nucleotide base 1 to 2622791 of SEQ ID NO: 3; or
[0101] 4) chromosomal interval derived from PI440935, PI483193, PI595799, or a progeny thereof wherein said chromosomal interval comprises a portion of any one of the chromosome intervals described in 1)-3) wherein the chromosome interval comprises at least one SNP marker as demonstrated respectfully in any one of Tables 1-3; or
[0102] 5) A chromosomal interval spanning 20 cM, 15 cM, 10 cM, 5 cM, 1 cM, or 0.5 cM from a SNP marker that associates with increased ASR resistance in soybean wherein the SNP marker is selected from the group consisting of any SNP marker displayed in any one of Tables 1-3.

[0103] Methods for producing an disease resistant soybean plant may comprise, consist essentially of or consist of detecting, in a germplasm, a marker associated with enhanced disease resistance (e.g. ASR) wherein said marker is selected from any one of Tables 1-3 or wherein marker is a closely linked loci of any marker described in any of Tables 1-3 and producing a soybean plant from said germplasm. The marker may be detected in any sample taken from the germplasm, including, but not limited to, a portion of said germplasm (e.g., a seed chip or a cell from said germplasm) or a nucleotide sequence from said germplasm. Such a sample may be taken from the germplasm using any present or future method known in the art, including, but not limited to, automated methods of removing a portion of endosperm with a sharp blade, drilling a small hole in the seed and collecting the resultant powder, cutting the seed with a laser and punching a leaf disk. The germplasm may be of a non-naturally occurring variety of soybean. In some embodiments, the genome of the germplasm is at least about 50%, 55%, 60%, 65%, 70%, 75%, 80%, 85%, 90%, 95%, 97%, 99% or 100% identical to that of an elite variety of soybean. A disease resistant soybean plant is then produced from the germplasm identified as having the marker associated with enhanced disease resistance (e.g. ASR) according to methods well known in the art for breeding and producing plants from germplasm.

[0104] In some embodiments, the marker detected in the germplasm may comprise, consist essentially of or consist of one or more marker alleles located within a chromosomal interval selected from the group consisting of:
[0105] 1) A chromosomal interval derived from PI440935, PI483193, PI595799, or a progeny thereof wherein said chromosomal interval corresponds with nucleotide base 1 to nucleotide base 5873075 of SEQ ID NO: 1; or
[0106] 2) chromosomal interval derived from PI440935, PI483193, PI595799, or a progeny thereof wherein said chromosomal interval corresponds with nucleotide base 1 to nucleotide base 2442980 of SEQ ID NO: 2; or
[0107] 3) chromosomal interval derived from PI440935, PI483193, PI595799, or a progeny thereof wherein said chromosomal interval corresponds with nucleotide base 1 to
[0108] 2622791 of SEQ ID NO: 3; or
[0109] 4) chromosomal interval derived from PI440935, PI483193, PI595799, or a progeny thereof wherein said chromosomal interval comprises a portion of any one of the chromosome intervals described in 1)-3) wherein the chromosome interval comprises at least one SNP marker as demonstrated respectfully in any one of Tables 1-3; or
[0110] 5) A chromosomal interval spanning 20cM, 15cM, 10cM, ScM, 1cM, 0.5cM from a SNP marker that associates with increased ASR resistance in soybean wherein the SNP marker is selected from the group consisting of any SNP marker displayed in any one of Tables 1-3.

[0111] Methods for producing and/or selecting an Asian soy rust resistant/tolerant soybean plant or germplasm may comprise crossing a first soybean plant or germplasm with a second soybean plant or germplasm, wherein said first soybean plant or germplasm comprises a chromosomal interval selected from the group consisting of:
[0112] 1) A chromosomal interval derived from PI440935, PI483193, PI595799, or a progeny thereof wherein said chromosomal interval corresponds with nucleotide base 1 to nucleotide base 5873075 of SEQ ID NO: 1; or
[0113] 2) chromosomal interval derived from PI440935, PI483193, PI595799, or a progeny thereof wherein said chromosomal interval corresponds with nucleotide base 1 to nucleotide base 2442980 of SEQ ID NO: 2; or
[0114] 3) chromosomal interval derived from PI440935, PI483193, PI595799, or a progeny thereof wherein said chromosomal interval corresponds with nucleotide base 1 to 2622791 of SEQ ID NO: 3; or
[0115] 4) chromosomal interval derived from PI440935, PI483193, PI595799, or a progeny thereof wherein said chromosomal interval comprises a portion of any one of the chromosome intervals described in 1)-3) wherein the chromosome interval comprises at least one SNP marker as demonstrated respectfully in any one of Tables 1-3; or
[0116] 5) A chromosomal interval spanning 20 cM, 15 cM, 10 cM, 5 cM, 1 cM, 0.5 cM from a SNP marker that associates with increased ASR resistance in soybean wherein the SNP marker is selected from the group consisting of any SNP marker displayed in any one of Tables 1-3.
[0117] 6) A chromosomal interval spanning 20 cM, 15 cM, 10 cM, 5 cM, 1 cM, 0.5 cM from a SNP marker that associates with increased ASR resistance in soybean wherein the SNP marker is selected from the group consisting of any SNP marker displayed in any one of Tables 1-3; or
[0118] 7) A chromosomal interval spanning 20 cM, 15 cM, 10 cM, 5 cM, 1 cM, 0.5 cM from a SNP marker that associates with increased ASR resistance in soybean wherein the SNP marker is selected from the group consisting of any SNP marker displayed in any one of Tables 1-3, and crossing with a second soybean plant not comprising the chromosome interval then producing a progeny plant with increased ASR resistance. Either the first or second soybean plant or germplasm, or both, may be of a non- naturally occurring variety of soybean. In some embodiments, the second soybean plant or germplasm is of an elite variety of soybean. In some embodiments, the genome of the second soybean plant or germplasm is at least about 50%, 55%, 60%, 65%, 70%, 75%, 80%, 85%, 90%, 95%, 97%, 99% or 100% identical to that of an elite variety of soybean.

[0119] Also provided herein is a method of introgressing an allele associated with enhanced Disease (e.g. ASR, SCN, SDS, RKN, Phytopthora, etc.) resistance/tolerance (e.g. ASR, SCN, SDS, RKN, Phytopthora, etc.) in to a soybean plant. Such methods for introgressing an allele associated with enhanced Disease (e.g. ASR, SCN, SDS, RKN, Phytopthora, etc.) resistance/tolerance into a soybean plant or germplasm may comprise, consist essentially of or consist of crossing a first soybean plant or germplasm comprising said allele (the donor) wherein said allele is selected from any allele listed in Tables 1-3 or a maker in “close proximity” to a marker listed in Tables 1-3 with a second soybean plant or germplasm that lacks said allele (the recurrent parent) and repeatedly backcrossing progeny comprising said allele with the recurrent parent. Progeny comprising said allele may be identified by detecting, in their genomes, the presence of a marker associated with enhanced Disease (e.g. ASR, SCN, SDS, RKN, Phytopthora, etc.) resistance/tolerance. The marker may be detected in any sample taken from the progeny, including, but not limited to, a portion of said progeny (e.g., a seed chip, a leaf punch disk or a cell from said plant or germplasm) or a nucleotide sequence from said progeny. Such a sample may be taken from the progeny using any present or future method known in the art, including, but not limited to, automated methods of removing a portion of endosperm with a sharp blade, drilling a small hole in the seed and collecting the resultant powder, cutting the seed with a laser and punching a leaf disk. Either the donor or the recurrent parent, or both, may be of a non-naturally occurring variety of soybean. In some embodiments, the recurrent parent is of an elite variety of soybean. In some embodiments, the genome of the recurrent parent is at least about 50%, 55%, 60%, 65%, 70%, 75%, 80%, 85%, 90%, 95%, 97%, 99% or 100% identical to that of an elite variety of soybean.

[0120] hi some embodiments, the marker used to identify progeny comprising an allele associated with enhanced Disease (e.g. ASR, SCN, SDS, RKN, Phytopthora, brown stem rot etc.) resistance/tolerance may comprise, consist essentially of or consist of one or more marker alleles located within a chromosomal interval selected from the group consisting of:
[0121] 1) chromosomal interval derived from PI440935, PI483193, PI595799, or a progeny thereof wherein said chromosomal interval corresponds with nucleotide base 1 to nucleotide base 5873075 of SEQ ID NO: 1; or
[0122] 2) chromosomal interval derived from PI440935, PI483193, PI595799, or a progeny thereof wherein said chromosomal interval corresponds with nucleotide base 1 to nucleotide base 2442980 of SEQ ID NO: 2; or
[0123] 3) chromosomal interval derived from PI440935, PI483193, PI595799, or a progeny thereof wherein said chromosomal interval corresponds with nucleotide base 1 to 2622791 of SEQ ID NO: 3; or
[0124] 4) chromosomal interval derived from PI440935, PI483193, PI595799, or a progeny thereof wherein said chromosomal interval comprises a portion of any one of the chromosome intervals described in 1)-3) wherein the chromosome interval comprises at least one SNP marker as demonstrated respectfully in any one of Tables 1-3; or
[0125] 5) A chromosomal interval spanning 20 cM, 15 cM, 10 cM, 5 cM, 1 cM, 0.5 cM from a SNP marker that associates with increased ASR resistance in soybean wherein the SNP marker is selected from the group consisting of any SNP marker displayed in any one of Tables 1-3; or
[0126] 6) a chromosomal interval spanning 20 cM, 15 cM, 10 cM, 5 cM, 1 cM, 0.5 cM from a SNP marker that associates with increased ASR resistance in soybean wherein the SNP marker is selected from the group consisting of any SNP marker displayed in Tables 1-3 or any closely linked markers in close proximity to said intervals 1)-4).

[0127] In some embodiments, the marker may comprise, consist essentially of or consist of marker alleles located in at least two different chromosomal intervals. For example, the marker may comprise one or more alleles located in the chromosomal interval defined by and including any two markers in Table 1, any two markers located in Table 2 any two markers in Table 3 or a combination of any SNP markers thereof.

### Disease resistant Soybean Plants and Germplasms

[0128] The present invention provides disease resistant soybean plants and germplasms. As discussed above, the methods of the present invention may be utilized to identify, produce and/or select a disease resistant soybean plant or germplasm (for example a soybean plant resistant or having increased tolerance to Asian Soybean Rust). In addition to the methods described above, a disease resistant soybean plant or germplasm may be produced by any method whereby a marker associated with enhanced Disease tolerance is introduced into the soybean plant or germplasm, including, but not limited to, transformation, protoplast transformation or fusion, a double haploid technique, embryo rescue, gene editing and/or by any other nucleic acid transfer system.

[0129] In some embodiments, the soybean plant or germplasm comprises a non-naturally occurring variety of soybean. In some embodiments, the soybean plant or germplasm is at least about 50%, 55%, 60%, 65%, 70%, 75%, 80%, 85%, 90%, 95%, 97%, 99% or 100% identical to that of an elite variety of soybean.

[0130] The Disease resistant soybean plant or germplasm may be the progeny of a cross between an elite variety of soybean and a variety of soybean that comprises an allele associated with enhanced Disease tolerance (e.g. ASR) wherein the allele is within a chromosomal interval selected from the group consisting of:
[0131] 1) chromosomal interval derived from PI440935, PI483193, PI595799, or a progeny thereof wherein said chromosomal interval corresponds with nucleotide base 1 to nucleotide base 5873075 of SEQ ID NO: 1; or
[0132] 2) chromosomal interval derived from PI440935, PI483193, PI595799, or a progeny thereof wherein said chromosomal interval corresponds with nucleotide base 1 to nucleotide base 2442980 of SEQ ID NO: 2; or
[0133] 3) chromosomal interval derived from PI440935, PI483193, PI595799, or a progeny thereof wherein said chromosomal interval corresponds with nucleotide base 1 to 2622791 of SEQ ID NO: 3; or
[0134] 4) chromosomal interval derived from PI440935, PI483193, PI595799, or a progeny thereof wherein said chromosomal interval comprises a portion of any one of the chromosome intervals described in 1)-3) wherein the chromosome interval comprises at least one SNP marker as demonstrated respectfully in any one of Tables 1-3; or
[0135] 5) A chromosomal interval spanning 20 cM, 15 cM, 10 cM, 5 cM, 1 cM, 0.5 cM from a

[0136] SNP marker that associates with increased ASR resistance in soybean wherein the SNP marker is selected from the group consisting of any SNP marker displayed in any one of Tables 1-3; or
[0137] 6) a chromosomal interval spanning 20 cM, 15 cM, 10 cM, 5 cM, 1 cM, 0.5 cM from a SNP marker that associates with increased ASR resistance in soybean wherein the SNP marker is selected from the group consisting of any SNP marker displayed in Tables 1-3 or any closely linked markers in close proximity to said intervals 1)-4).

[0138] The disease resistant soybean plant or germplasm may be the progeny of an introgression wherein the recurrent parent is an elite variety of soybean and the donor comprises an allele associated with enhanced disease tolerance and/or resistance wherein the donor carries a chromosomal interval or a portion thereof comprising any one of SEQ ID NOs: 1-3 and wherein the chromosome interval comprises at least one allele selected respectively from Tables 1-3.

[0139] The disease resistant soybean plant or germplasm may be the progeny of a cross between a first elite variety of soybean (e.g., a tester line) and the progeny of a cross between a second elite variety of soybean (e.g., a recurrent parent) and a variety of soybean that comprises an allele associated with enhanced ASR tolerance (e.g., a donor).

[0140] The Disease resistant soybean plant or germplasm may be the progeny of a cross between a first elite variety of soybean and the progeny of an introgression wherein the recurrent parent is a second elite variety of soybean and the donor comprises an allele associated with enhanced ASR tolerance.

[0141] A Disease resistant soybean plant and germplasm of the present invention may comprise one or more markers of the present invention (e.g. any marker described in Tables 1-3; or any marker in close proximity to any marker as described in Tables 1-3).

[0142] In some embodiments, the Disease resistant soybean plant or germplasm may comprise within its genome, a marker associated with enhanced ASR tolerance, wherein said marker is located within a chromosomal interval selected from the group consisting of:
[0143] 1) chromosomal interval derived from PI440935, PI483193, PI595799, or a progeny thereof wherein said chromosomal interval corresponds with nucleotide base 1 to nucleotide base 5873075 of SEQ ID NO: 1; or
[0144] 2) chromosomal interval derived from PI440935, PI483193, PI595799, or a progeny thereof wherein said chromosomal interval corresponds with nucleotide base 1 to nucleotide base 2442980 of SEQ ID NO: 2; or
[0145] 3) chromosomal interval derived from PI440935, PI483193, PI595799, or a progeny thereof wherein said chromosomal interval corresponds with nucleotide base 1 to 2622791 of SEQ ID NO: 3; or
[0146] 4) chromosomal interval derived from PI440935, PI483193, PI595799, or a progeny thereof wherein said chromosomal interval comprises a portion of any one of the chromosome intervals described in 1)-3) wherein the chromosome interval comprises at least one SNP marker as demonstrated respectfully in any one of Tables 1-3; or
[0147] 5) A chromosomal interval spanning 20 cM, 15 cM, 10 cM, 5 cM, 1 cM, 0.5 cM from a SNP marker that associates with increased ASR resistance in soybean wherein the SNP marker is selected from the group consisting of any SNP marker displayed in any one of Tables 1-3; or
[0148] 6) a chromosomal interval spanning 20 cM, 15 cM, 10 cM, 5 cM, 1 cM, 0.5 cM from a SNP marker that associates with increased ASR resistance in soybean wherein the SNP marker is selected from the group consisting of any SNP marker displayed in Tables 1-3 or any closely linked markers in close proximity to said intervals 1)-4).

[0149] In some embodiments, the disease resistant soybean plant or germplasm may comprise within its genome a marker that comprises, consists essentially of or consists of marker alleles located in at least two different chromosomal intervals. For example, the marker may comprise one or more alleles located in the chromosomal interval defined by and including any combination of two markers in any one of Tables 1-3.

### Disease resistant Soybean Seeds

[0150] The present invention provides disease resistant soybean seeds. As discussed above, the methods of the present invention may be utilized to identify, produce and/or select a Disease resistant soybean seed. In addition to the methods described above, a disease resistant soybean seed may be produced by any method whereby a marker associated with enhanced ASR tolerance is introduced into the soybean seed, including, but not limited to, transformation, protoplast transformation or fusion, a double haploid technique, embryo rescue, genetic editing (e.g. CRISPR or TALEN or MegaNucleases) and/or by any other nucleic acid transfer system.

[0151] In some embodiments, the disease resistant soybean seed comprises a non-naturally occurring variety of soybean. In some embodiments, the soybean seed is at least about 50%, 55%, 60%, 65%, 70%, 75%, 80%, 85%, 90%, 95%, 97%, 99% or 100% identical to that of an elite variety of soybean.

[0152] The disease resistant soybean seed may be produced by a disease resistant soybean plant identified, produced or selected by the methods of the present invention. In some embodiments, the disease resistant soybean seed is produced by a disease resistant soybean plant of the present invention.

[0153] A disease resistant soybean seed of the present invention may comprise one or more markers from Tables 1-3 of the present invention.

[0154] In some embodiments, the Disease resistant soybean seed may comprise within its genome, a marker associated with enhanced ASR tolerance, wherein said marker is located within a chromosomal interval selected from the group consisting of:
[0155] 1) chromosomal interval derived from PI440935, PI483193, PI595799, or a progeny thereof wherein said chromosomal interval corresponds with nucleotide base 1 to nucleotide base 5873075 of SEQ ID NO: 1; or
[0156] 2) chromosomal interval derived from PI440935, PI483193, PI595799, or a progeny thereof wherein said chromosomal interval corresponds with nucleotide base 1 to nucleotide base 2442980 of SEQ ID NO: 2; or
[0157] 3) chromosomal interval derived from PI440935, PI483193, PI595799, or a progeny thereof wherein said chromosomal interval corresponds with nucleotide base 1 to 2622791 of SEQ ID NO: 3; or
[0158] 4) chromosomal interval derived from PI440935, PI483193, PI595799, or a progeny thereof wherein said chromosomal interval comprises a portion of any one of the chromosome intervals described in 1)-3) wherein the chromosome interval comprises at least one SNP marker as demonstrated respectfully in any one of Tables 1-3; or
[0159] 5) A chromosomal interval spanning 20 cM, 15 cM, 10 cM, 5 cM, 1 cM, 0.5 cM from a SNP marker that associates with increased ASR resistance in soybean wherein the

[0160] SNP marker is selected from the group consisting of any SNP marker displayed in any one of Tables 1-3; or
[0161] 6) a chromosomal interval spanning 20 cM, 15 cM, 10 cM, 5 cM, 1 cM, 0.5 cM from a SNP marker that associates with increased ASR resistance in soybean wherein the SNP marker is selected from the group consisting of any SNP marker displayed in Tables 1-3 or any closely linked markers in close proximity to said intervals 1)-4).

### EXAMPLES

[0162] The following examples are not intended to be a detailed catalog of all the different ways in which the present invention may be implemented or of all the features that may be added to the present invention. Persons skilled in the art will appreciate that numerous variations and additions to the various embodiments may be made without departing from the present invention. Hence, the following descriptions are intended to illustrate some particular embodiments of the invention, and not to exhaustively specify all permutations, combinations and variations thereof.

### Example 1: Identification of ASR Resistant Wild Glycine Lines Wild glycine lines were evaluated for rust resistance against sixteen rust strains (See FIG. 1). The rust data were generated using single pustule derived isolates from USDA-ARS (FL Q09, FL Q12, LABR13, FLQ11) and field populations (FL Q15, NC06, Vero, GLC15, UBL, BR south and BR central), the screening was carried out in contained facilities (FL Q09, FL Q12, LABR13, FLQ11, FL Q15, NC06, Vero, GLC15, UBL, BR South, BR central).

[0163] The rust rating is categorized based on groupings modified from Burdon and Speer, TAG, 1984 (see FIG. 2). Each accession was screened >2 times with ˜4 plants each time in North & South America.

### Example 2: Allele Mining & Associations to P1440935, P1483193, P1595799 ASR Loci

[0164] A resistant parent was crossed to a susceptible G. canescens line and an F1 plant was generated (See Table 4). The F1 plant was self-fertilized and F2 seed was harvested from the selfed F1 plant. Around 200 F2 seed were sown and leaf tissue from each plant was collected for DNA preps and then the plants were inoculated with Phakopsora pachyrhizi to determine the resistance/susceptible phenotype of each F2 individual. Tissue from 50 resistant F2s and 50 susceptible F2s were combined in separate pools and genomic DNA was prepared from each pool. Illumina sequencing libraries were prepared from DNA for each of the pools and each library was sequenced in two Illumina HiSeq2000 2x100bp Paired-End (PE) lanes. The average yield per sample was 383 million read pairs, which equals 77 gigabases of sequence per library. The sequencing reads were trimmed to remove bases with PHRED quality scores of <15.

[0165] As one non-limiting example, an ASR resistance phenotype may include the formation of lesions without spores on leaves of a plant exposed to ASR, while an ASR susceptible phenotype includes the formation of spores on the leaves of a plant exposed to ASR. Still other phenotypes may be used to distinguish ASR resistant plants from susceptible plants.

[0166] Quality trimmed reads were aligned to the PI440935 and PI595799 reference genome sequence using GSNAP (WU and NACU 2010) as paired-end fragments. If a pair of reads could not be aligned together, they were treated as singletons for alignment. Reads were used in subsequent analyses if they mapped uniquely to the reference (≤2 mismatches every 36 bp and less than 5 bases for every 75 bp as tails).

[0167] SNPs were filtered prior to BSA analysis based on read depth, with SNPs having between 40 and 200× read depth being retained. A Chi-square test was used to select SNPs with significantly different read counts between the two alleles in the two pools. An empirical Bayesian approach (LIU et al. 2012) was used to estimate the conditional probability that there is no recombination between each SNP marker and the causal locus in both the resistant pool and in the susceptible pool. The probability of the linkage between the SNP and the causal gene is the geometric mean of these two conditional probabilities. Around 1000 SNPs were found to have possible linkage to the target locus. A subset of these putatively linked SNPs was used to fine map the locus using phenotyped F2 individuals.

See references: LIU, S., C.-T. YEH, H. M. TANG, D. NETTLETON AND P. S. SCHNABLE, 2012 Gene Mapping via Bulked Segregant RNA-Seq (BSR-Seq). PLoS ONE 7: e36406 & Wu, T. D., and S. Nacu, 2010 Fast and SNP-tolerant detection of complex variants and splicing in short reads. Bioinformatics 26: 873-881.

TABLE 4
Plant Crossings & Study Type

| | | | | F2: Resistant |
|---|---|---|---|---|
| | PI # | PI # | Study | to Susceptible |
| Species | (male) | (female | Type | Ratio |
| G. canescens | PI 440935 | PI 505154 | BSA | 3:01 |
| G. canescens | PI 440935 | PI 505154 | Indexing | 3:01 |
| G. canescens | PI 483193 | PI 505154 | BSR + DEG | 3:01 |
| G. canescens | PI 595799 | PI 505154 | Indexing | 3:01 |

[0168] 1. PI440935 Data2Bio LLC (Ames, Iowa) Lab Methodology for gBSA-Seq Analysis for Tetraploid Soybean.

[0169] Chromosome discovery for causal loci in the tetraploid soybean population, PI440935 was carried out using Data2Bio's Genomic Bulked Segregant Analysis (gBSA) technology. It was theorized that resistance is controlled by a single dominant gene. Data2Bio generated several libraries from DNA samples extracted from two susceptible tissue pools and two resistant tissue pools and sequenced these in eight (8) Illumina HiSeq2000 2x100bp Paired-End (PE) lanes. A summary of the reference genomes used for subsequent analyses, read processing from raw data to quality trimming, alignment, SNP discovery and SNP impact are demonstrated in FIGS. 3-5. After various filtering steps 1,099,754 and 324,931 informative SNPs were identified in the PI440935 genome. A Bayesian approach was then used to calculate trait-associated probabilities. Next, physical maps of trait-associated SNPs (probability cutoff 0.01) for the top contigs were created (FIGS. 3-5). One scaffold, scaffold 000056F, was identified and mapped to chromosome 14 of PI440953 (SEQ ID NOs: 1). SNPs from this enriched scaffold were mapped to the public G. max genome. An additional smaller cluster of SNPs from other scaffolds were also observed on chromosome 6 (see FIGS. 3-4).

[0170] 2. PI595799 Data2Bio LLC (Ames, Iowa) Lab Methodology for gBSA-Seq Analysis for Tetraploid Soybean

[0171] Chromosome discovery for causal loci in the tetraploid soybean population, PI595799 was carried out. A physical map of trait-associated SNPs on contigs was created. The clustering of these SNPs indicates that the resistance gene is located on or near scaffold 000090F (SEQ ID NO: 2). The context sequences associated with these SNPs were also aligned to the public G. max genome to create a chromosome-level understanding of the mapping interval. The chromosomal positions of the trait-associated SNPs were then displayed graphically.

### Example 3 Embryo Rescue & Introgression of R Gene Intervals Into Glycine max Lines

[0172] Embryo rescue is performed and chemical treatment is applied in order to generate amphidiploid shoots (that is, shoots from plants having chromosomes from both parents that have been doubled in number through the use of chemical treatment). If the amphidiploid plants are fertile they will be used to backcross with G. max. Backcrossing with G. max and subsequent embryo rescue will need to be performed for several generations in order to gradually eliminate the perennial Glycine chromosomes.

[0173] Wide crosses: Elite Syngenta soybean lines (RM 3.7 to 4.8) are used as the females (pollen recipients) and multiple accessions of Glycine canescens are used as the males or pollen donors. Selecting flowers from the glycine plant containing anthers at the proper developmental stage is important. New, fully-opened, brightly colored flowers hold anthers with mature pollen. The pollen should appear as loose, yellow dust. These flowers are removed from the glycine plant and taken to the soybean plant for pollination. Pollen from the Glycine plants should be used within 30 minutes of flower removal. It is also important to identify and select soybean flower buds that are ready for pollination. A soybean flower bud is generally ready when it is larger in size when compared to an immature bud. The sepals of the soybean blossoms are lighter in color and the petals are just beginning to appear. First, use a pair of fine-tipped tweezers to carefully detach the sepals from the flower bud to expose the outer set of petals. Then gently grasp and remove the petals (5 in total) from the flower exposing the ring of stamens surrounding the pistil. Since the stigma is receptive to pollen 1 day before the anthers begin shedding pollen it is important to recognize the stage development of “female ready, male not ready”. When pollinating soybean flowers at this developmental stage it is not necessary to emasculate the female flower. Locate the stigma on the soybean flower. Then using 1 male flower, carefully peel off the petals to expose the anthers and gently dust the pollen grains onto the stigma of the soybean flower. Care should be taken not to damage the stigma at any time during this process. Starting the day after pollination a hormone mixture is sprayed onto the pollinated flower and eventual developing F1 pod 1× every day until harvest. The pollinated flower or pod is saturated with a light mist of the hormone mixture, taking care not to cause the flower/pod to prematurely detach from the plant. The mixture contains 100 mg GA3, 25 mg NAA and 5 mg kinetin/L distilled water. These hormones aid in the retention of the developing pod and in increased pod growth.

[0174] Harvest: Pods from wide crosses are harvested at approximately 14 to 16 days post pollination. (Harvest dates in the literature suggest 19 to 21 days. Herein, the harvest is ˜5 days earlier than literature, reducing timeline. Before selecting an individual pod to harvest verify that the sepals were removed (this indicates a wide cross attempt) and that the seed size is as expected for a wide cross. Pods are collected and counted according to wide cross combination to determine crossing success. The average crossing success across multiple soybean females and 5 different accessions of Glycine canescens is approximately 40%. The wide cross pods can contain 1 to 3 seeds but generally 2 seeds are found in each F1 pod.

[0175] Embryo rescue: Our embryo rescue protocol involves direct shoot regeneration from embryos, rather than regeneration through embryogenesis, thus making plant recovery quicker (shoot recovery in approximately 2-3 months, compared to reported up to 1 year timeline). Our protocol does not include culture in the dark following transfer to germination medium. Our protocol does not require a transfer to rooting medium.

[0176] Harvested pods are collected and brought back to the lab to be sterilized. The pods are first rinsed with 70% EtOH for 2 to 3 minutes and then placed in 10% Clorox bleach for an additional 30 minutes on a platform shaker at approximately 130 RPM. Finally, the pods are rinsed multiple times with sterile water to remove any residual bleach. Embryo isolation can begin immediately following pod sterilization or pods can be stored at 4° C. for up to 24 hours prior to embryo isolation. The sterilized pods are next taken to a laminar flow hood where the embryos can be rescued. Individual pods are placed in a sterile petri dish and opened using a scalpel and forceps. An incision is made along the length of the wide cross pod away from the seed. The pod can then be easily opened to expose the seed. Alternatively, two pair of forceps can be used to separate the pod shell. Carefully remove the seed from the pod and place in a sterile petri dish under the dissection microscope. Very fine forceps are needed to isolate the embryo from the seed. With forceps in one hand, gently hold the side of the seed away from the embryo, with hilum facing up. Use another pair of forceps in the other hand to remove the seed coat from the side of the seed containing the embryo. Peel off the membrane surrounding the embryo and push the embryo up from tis bottom side. Embryos should be past the globular developmental stage and preferably past the early heart developmental stage (middle to late heart stage, cotyledon stage and early maturation stage embryos are desired). Isolated embryos are transferred to embryo rescue medium such as Soy ER1-1. Embryos can be treated to induce chromosome doubling at this time. (See below for chromosome doubling details.) Isolated embryos remain on embryo rescue medium for 21 to 30 days at 24° C. Embryos may remain in the dark for the entire incubation on ER1-1, may begin the incubation in the dark and complete it in the light, or may spend the entire incubation in the light. There is not a callus induction stage in this protocol. Shoots are developed directly from the embryos.

[0177] Chromosome doubling treatments: Either colchicine of trifluralin can be used to induce chromosome doubling to produce a doubled F1 plant. The chemical treatment can be done immediately following embryo rescue. Ideally, late heart stage wide cross embryos (or larger) are chemically treated to induce chromosome doubling at any time from immediately following isolation up to 1 week post isolation. The doubling agent can be mixed in either solid or liquid medium and applied for several hours or up to a few days. Trifluralin is used at a concentration of 10-40 uM in either solid or liquid media. Additionally, colchicine is used at a concentration of 0.4-1 mg/ml in either solid or liquid media. Following the chemical treatment the embryos are transferred to fresh embryo rescue medium.

[0178] Shoot regeneration: Developing embryos are transferred from rescue medium to germination medium such as Soy ER GSMv2 for approximately 3 to 5 weeks in the light at 24° C. Alternatively, developing embryos may be transferred from rescue medium to elongation medium such as Soy El 0 No TCV for approximately 3 to 5 weeks in the light at 24° C. Developing shoots may be transferred from media plates to Phytocons containing either germination or elongation medium for further shoot development. Established shoots are moved to soil. Initial plant care is critical for survival of these shoots.

[0179] Ploidy Analysis: Ploidy analysis is conducted using a flow cytometer. Leaf tissue for ploidy analysis is collected from small shoots either in culture or after establishment in soil. Tissue is collected on dry ice and stored at −80° C. until analysis, or collected on wet ice and analyzed the same day. A sample size of 0.5 cm² is sufficient. Samples are prepared according to the instructions in the Sysmex kit. Each sample set contains an untreated F1 plant (not treated to induce chromosome doubling) as a control. The following are method notes: Wide crosses—Our wide cross success rate is significantly higher than that reported in the literature. No emasculation of female flowers is performed, which saves time and reduces risk of damage to the stigma.

[0180] The above examples clearly illustrate the advantages of the invention. Although the present invention has been described with reference to specific details of certain embodiments thereof, it is not intended that such details should be regarded as limitations upon the scope of the invention except as and to the extent that they are included in the accompanying claims.

[0181] For example, the current disclosure is also directed to an elite Glycine max plant having introduced into its genome a chromosomal interval from a Glycine tomentella line selected from at least one of PI509501or a progeny thereof, wherein said chromosomal interval confers increased Asian soy rust (ASR) resistance as compared to a control plant not comprising said chromosomal interval. The chromosomal interval may vary and may include SEQ ID NO: 5, SEQ ID NO: 6, both, or a portion of either. Table 5 illustrates, by way of example, a few of the SNP marker associated with increased ASR resistance within SEQ ID NO: 5. Similar SNPs are expected to be present in SEQ ID NO: 6 due to homology. The current disclosure also includes progeny of those plants, as well as plant cells.

[0182] In one embodiment, the disclosure is directed to an elite soybean plant comprising a ASR resistant allele which confers increased resistance to ASR, and wherein the ASR allele comprises at least one single nucleotide polymorphism (SNP) selected from the group of “favorable” SNPs described in Table 5.

[0183] In another embodiment, the disclosure is directed to an elite soybean plant comprising a chromosomal interval from Glycine tomentella comprising at least one favorable SNP marker selected from Table 5.

[0184] The current disclosure also includes methods for producing a Glycine max plant shaving increased resistance to ASR. In one example, a method comprises the steps of: (a) providing a Glycine tomentella plant line, or progeny thereof comprising a chromosomal interval corresponding to any one of SEQ ID NOs 4-5; (b) carrying out the embryo rescue method essentially as described in Example 3 or as described in U.S. Pat. No. 7,842,850; (c) collecting the seeds resulting from the method of (b); and (d) regenerating the seeds of (c) into plants.

The Glycine tomentella plant line of (a) may be PI509501 or a progeny thereof.

[0185] In another embodiment, the current disclosure is directed to methods of identifying or selecting soybean plants having an ASR resistance allele derived from Glycine tomentella. In one example, a method comprises the steps of: (a) isolating a nucleic acid from a soybean plant; (b) detecting in the nucleic acid the presence of a molecular marker that associates with increased ASR resistance wherein the molecular marker is located within an interval corresponding to SEQ ID NO: 4 or SEQ ID NO: 5; and (c) Identifying or selecting a soybean plant having a ASR resistance allele derived from Glycine tomentella.

TABLE 5

| | | | Favor- | Unfa- |
|---|---|---|---|---|
| | | | able | vorable |
| Cross | RefSeq | Position | Allele | Allele |
| PI_537294_x_PI_509501 | scaffold4269 | 23239 | T | C |
| PI_537294_x_PI_509501 | scaffold4269 | 79983 | C | T |
| PI_537294_x_PI_509501 | scaffold4269 | 99272 | T | A |
| PI_537294_x_PI_509501 | scaffold4269 | 104752 | T | C |
| PI_537294_x_PI_509501 | scaffold4269 | 124092 | A | G |
| PI_537294_x_PI_509501 | scaffold4269 | 129565 | A | G |
| PI_537294_x_PI_509501 | scaffold4269 | 129705 | G | C |
| PI_537294_x_PI_509501 | scaffold4269 | 130014 | C | T |
| PI_537294_x_PI_509501 | scaffold4269 | 135090 | T | C |
| PI_537294_x_PI_509501 | scaffold4269 | 167337 | T | A |
| PI_537294_x_PI_509501 | scaffold4269 | 167965 | A | G |
| PI_537294_x_PI_509501 | scaffold4269 | 168112 | C | T |
| PI_537294_x_PI_509501 | scaffold4269 | 168232 | G | T |
| PI_537294_x_PI_509501 | scaffold4269 | 177749 | T | C |
| PI_537294_x_PI_509501 | scaffold4269 | 178004 | A | G |
| PI_537294_x_PI_509501 | scaffold4269 | 185159 | T | C |
| PI_537294_x_PI_509501 | scaffold4269 | 186815 | A | C |
| PI_537294_x_PI_509501 | scaffold4269 | 241213 | T | C |
| PI_537294_x_PI_509501 | scaffold4269 | 293570 | A | G |
| PI_537294_x_PI_509501 | scaffold4269 | 298588 | G | A |
| PI_537294_x_PI_509501 | scaffold4269 | 301999 | A | C |
| PI_537294_x_PI_509501 | scaffold4269 | 306886 | A | G |
| PI_537294_x_PI_509501 | scaffold4269 | 306945 | A | G |
| PI_537294_x_PI_509501 | scaffold4269 | 318152 | A | G |
| PI_537294_x_PI_509501 | scaffold4269 | 334509 | C | A |
| PI_537294_x_PI_509501 | scaffold4269 | 335048 | C | T |
| PI_537294_x_PI_509501 | scaffold4269 | 363718 | G | T |
| PI_537294_x_PI_509501 | scaffold4269 | 365520 | A | G |
| PI_537294_x_PI_509501 | scaffold4269 | 388565 | G | A |
| PI_537294_x_PI_509501 | scaffold4269 | 396540 | A | G |
| PI_537294_x_PI_509501 | scaffold4269 | 404113 | CT | C |
| PI_537294_x_PI_509501 | scaffold4269 | 406222 | A | G |
| PI_537294_x_PI_509501 | scaffold4269 | 450526 | G | A |
| PI_537294_x_PI_509501 | scaffold4269 | 451859 | A | C |
| PI_537294_x_PI_509501 | scaffold4269 | 534852 | T | C |
| PI_537294_x_PI_509501 | scaffold4269 | 603200 | A | T |
| PI_537294_x_PI_509501 | scaffold4269 | 606351 | G | T |
| PI_537294_x_PI_509501 | scaffold4269 | 615832 | G | T |
| PI_537294_x_PI_509501 | scaffold4269 | 651624 | C | A |
| PI_537294_x_PI_509501 | scaffold4269 | 652357 | T | C |
| PI_537294_x_PI_509501 | scaffold4269 | 653033 | A | T |
| PI_537294_x_PI_509501 | scaffold4269 | 653720 | A | G |
| PI_537294_x_PI_509501 | scaffold4269 | 667853 | C | T |
| PI_537294_x_PI_509501 | scaffold4269 | 667989 | G | A |
| PI_537294_x_PI_509501 | scaffold4269 | 668172 | T | C |
| PI_537294_x_PI_509501 | scaffold4269 | 669025 | A | AG |
| PI_537294_x_PI_509501 | scaffold4269 | 669075 | A | G |
| PI_537294_x_PI_509501 | scaffold4269 | 669262 | G | A |
| PI_537294_x_PI_509501 | scaffold4269 | 669335 | A | G |
| PI_537294_x_PI_509501 | scaffold4269 | 669403 | T | C |
| PI_537294_x_PI_509501 | scaffold4269 | 670340 | G | T |
| PI_537294_x_PI_509501 | scaffold4269 | 671701 | A | G |
| PI_537294_x_PI_509501 | scaffold4269 | 672067 | C | T |
| PI_537294_x_PI_509501 | scaffold4269 | 672353 | A | C |
| PI_537294_x_PI_509501 | scaffold4269 | 743371 | T | A |
| PI_537294_x_PI_509501 | scaffold4269 | 785665 | A | G |
| PI_537294_x_PI_509501 | scaffold4269 | 834490 | T | G |
| PI_537294_x_PI_509501 | scaffold4269 | 947136 | C | G |
| PI_537294_x_PI_509501 | scaffold4269 | 1043091 | C | G |
| PI_537294_x_PI_509501 | scaffold4269 | 1051471 | G | C |
| PI_537294_x_PI_509501 | scaffold4269 | 1091749 | A | G |
| PI_537294_x_PI_509501 | scaffold4269 | 1141217 | T | A |
| PI_537294_x_PI_509501 | scaffold4269 | 1185573 | C | CA |
| PI_537294_x_PI_509501 | scaffold4269 | 1186111 | C | T |
| PI_537294_x_PI_509501 | scaffold4269 | 1189165 | T | C |
| PI_537294_x_PI_509501 | scaffold4269 | 1189407 | A | G |
| PI_537294_x_PI_509501 | scaffold4269 | 1192588 | T | C |
| PI_537294_x_PI_509501 | scaffold4269 | 1258706 | C | T |
| PI_537294_x_PI_509501 | scaffold4269 | 1259100 | G | T |
| PI_537294_x_PI_509501 | scaffold4269 | 1260122 | A | C |
| PI_537294_x_PI_509501 | scaffold4269 | 1261232 | A | G |
| PI_537294_x_PI_509501 | scaffold4269 | 1443299 | T | C |
| PI_537294_x_PI_509501 | scaffold4269 | 1445035 | G | A |
| PI_537294_x_PI_509501 | scaffold4269 | 1476447 | G | T |
| PI_537294_x_PI_509501 | scaffold4269 | 1497620 | G | A |
| PI_537294_x_PI_509501 | scaffold4269 | 1502459 | A | G |
| PI_537294_x_PI_509501 | scaffold4269 | 1560486 | A | C |
| PI_537294_x_PI_509501 | scaffold4269 | 1591755 | T | A |
| PI_537294_x_PI_509501 | scaffold4269 | 1614887 | T | A |
| PI_537294_x_PI_509501 | scaffold4269 | 1618869 | T | C |
| PI_537294_x_PI_509501 | scaffold4269 | 1623989 | G | A |
| PI_537294_x_PI_509501 | scaffold4269 | 1629367 | G | A |
| PI_537294_x_PI_509501 | scaffold4269 | 1638390 | T | C |
| PI_537294_x_PI_509501 | scaffold4269 | 1678873 | G | A |
| PI_537294_x_PI_509501 | scaffold4269 | 1716722 | A | C |
| PI_537294_x_PI_509501 | scaffold4269 | 1726691 | A | T |
| PI_537294_x_PI_509501 | scaffold4269 | 1728080 | T | C |
| PI_537294_x_PI_509501 | scaffold4269 | 1730100 | C | T |
| PI_537294_x_PI_509501 | scaffold4269 | 1730273 | C | A |
| PI_537294_x_PI_509501 | scaffold4269 | 1737567 | G | A |
| PI_537294_x_PI_509501 | scaffold4269 | 1745729 | A | G |
| PI_537294_x_PI_509501 | scaffold4269 | 1765553 | C | T |
| PI_537294_x_PI_509501 | scaffold4269 | 1779607 | A | G |
| PI_537294_x_PI_509501 | scaffold4269 | 1786196 | C | T |
| PI_537294_x_PI_509501 | scaffold4269 | 1795928 | G | A |
| PI_537294_x_PI_509501 | scaffold4269 | 1958636 | A | G |
| PI_537294_x_PI_509501 | scaffold4269 | 1975738 | C | G |
| PI_537294_x_PI_509501 | scaffold4269 | 1983209 | T | G |
| PI_537294_x_PI_509501 | scaffold4269 | 2008372 | T | C |
| PI_537294_x_PI_509501 | scaffold4269 | 2021838 | T | C |
| PI_537294_x_PI_509501 | scaffold4269 | 2049875 | G | C |
| PI_537294_x_PI_509501 | scaffold4269 | 2050047 | T | G |
| PI_537294_x_PI_509501 | scaffold4269 | 2062531 | G | T |
| PI_537294_x_PI_509501 | scaffold4269 | 2177333 | T | A |
| PI_537294_x_PI_509501 | scaffold4269 | 2180268 | G | A |
| PI_537294_x_PI_509501 | scaffold4269 | 2260853 | A | T |
| PI_537294_x_PI_509501 | scaffold4269 | 2307445 | G | A |
| PI_537294_x_PI_509501 | scaffold4269 | 2307823 | C | T |
| PI_537294_x_PI_509501 | scaffold4269 | 2313465 | A | G |
| PI_537294_x_PI_509501 | scaffold4269 | 2316786 | T | C |
| PI_537294_x_PI_509501 | scaffold4269 | 2328060 | A | C |
| PI_537294_x_PI_509501 | scaffold4269 | 2343963 | T | C |
| PI_537294_x_PI_509501 | scaffold4269 | 2382088 | A | G |
| PI_537294_x_PI_509501 | scaffold4269 | 2382218 | C | T |
| PI_537294_x_PI_509501 | scaffold4269 | 2383429 | T | C |
| PI_537294_x_PI_509501 | scaffold4269 | 2383578 | GGGA | G |
| PI_537294_x_PI_509501 | scaffold4269 | 2390431 | A | T |
| PI_537294_x_PI_509501 | scaffold4269 | 2409220 | A | C |
| PI_537294_x_PI_509501 | scaffold4269 | 2429440 | C | G |
| PI_537294_x_PI_509501 | scaffold4269 | 2521364 | T | C |
| PI_537294_x_PI_509501 | scaffold4269 | 2572932 | A | C |
| PI_537294_x_PI_509501 | scaffold4269 | 2629073 | T | C |
| PI_537294_x_PI_509501 | scaffold4269 | 2651246 | T | C |
| PI_537294_x_PI_509501 | scaffold4269 | 2663637 | G | T |
| PI_537294_x_PI_509501 | scaffold4269 | 2749090 | C | T |
| PI_537294_x_PI_509501 | scaffold4269 | 2920846 | T | C |
| PI_537294_x_PI_509501 | scaffold4269 | 2945928 | T | C |
| PI_537294_x_PI_509501 | scaffold4269 | 2968546 | A | T |
| PI_537294_x_PI_509501 | scaffold4269 | 2970465 | C | T |
| PI_537294_x_PI_509501 | scaffold4269 | 2973995 | A | T |
| PI_537294_x_PI_509501 | scaffold4269 | 2993695 | T | A |

[0186] Throughout this application, various patents, patent publications and non-patent publications are referenced. The disclosures of these patents, patent publications and non-patent publications in their entireties are incorporated by reference herein into this application in order to more fully describe the state of the art to which this invention pertains.

LENGTHY TABLES
The patent application contains a lengthy table section. A copy of the table is available in electronic form from the USPTO web site (https://seqdata.uspto.gov/?pageRequest=docDetail&DocID=US20220256795A1). An electronic copy of the table will also be available from the USPTO upon request and payment of the fee set forth in 37 CFR 1.19(b)(3).

That which is claimed:

1. A elite Glycine max plant having introduced into its genome a chromosomal interval from a Glycine canescens line selected from an accession line group consisting of PI440935, PI483193, PI595799 or a progeny thereof, wherein said chromosomal interval confers increased resistance to Asian soy rust (ASR) as compared to a control plant not comprising said chromosomal interval.

2. The plant of claim 1, wherein the chromosomal interval comprises SEQ ID NOs: 1, 2, or 3 or a portion of SEQ ID Nos: 1, 2, or 3.

3. The plant of claims 1-2, wherein the chromosomal interval comprises a SNP marker associated with increased ASR resistance wherein said SNP marker corresponds with any one of the favorable SNP markers as listed in Tables 1-3.

4. The plant of claims 1-3, wherein the chromosomal interval is derived from Glycine canescens chromosome 1, 2, 3, 4, 5, 6, 7, 8, 9, 10, 11, 12, 13, 14, 15, 16, 17, 18, 19, or 20.

5. The plant of claims 1-4, wherein the chromosomal interval corresponds to a position within the Glycine canescens genome that corresponds to SEQ ID NOs: 1-3.

6. A progeny plant or seed of any of claims 1-5.

7. A plant cell or plant part derived from the plant of claims 1-6.

8. The plant of claims 1-8, wherein the plant further shows increased resistance, relative to a control plant, to any one of the stresses selected from: diseases (such as powdery mildew, Pythium ultimum, Phytophthora root rot, leaf spot, blast, brown spot, root-knot nematode, soybean cyst nematode, soybean vein necrosis virus, soybean stem canker, soybean sudden death syndrome, leaf and neck blast, rust, frogeye leaf spot, brown stem rot, Fusarium, or sheath blight); insect pests (such as whitefly, aphid, grey field slug, sugarcane borer, green bug, or aphid); abiotic stress (such as drought tolerance, flooding, high level of salinity, heavy metal, aluminum, manganese, cadmium, zinc, UV-B, boron, iron deficiency chlorosis or cold tolerance (i.e. extreme temperatures)).

9. An elite soybean plant comprising an ASR resistant allele which confers increased resistance to ASR, and wherein the ASR allele comprises at least one single nucleotide polymorphism (SNP) selected from the group of “favorable” SNPs described in any one of Tables 1-3.

10. An elite soybean plant comprising a chromosomal interval from Glycine canescens comprising at least one favorable SNP marker selected from any one of Tables 1-3.

11. The plant of claim 10, wherein the Glycine canescens is any one of accession lines PI440935, PI483193, PI595799, or a progeny thereof.

12. A method for producing a Glycine max plant having increased resistance to ASR, the method comprising the steps of:
a. Providing a Glycine canescens plant line, or progeny thereof comprising a chromosomal interval corresponding to any one of SEQ ID NOs 1-3;
b. Carrying out the embryo rescue method essentially as described in Example 3 or as described in U.S. Pat. No. 7,842,850;
c. Collecting the seeds resulting from the method of b)
d. Regenerating the seeds of c) into plants.

13. The method of claim 12, wherein the Glycine canescens plant line of a) is any one of PI440935, PI483193, PI595799, or a progeny thereof.

14. A method of identifying or selecting a soybean plant having a ASR resistance allele derived from Glycine canescens, the method comprising the steps of:
a. Isolating a nucleic acid from a soybean plant;
b. Detecting in the nucleic acid the presence of a molecular marker that associates with increased ASR resistance, wherein the molecular marker is located within 20 cM, 10 cM, 5 cM, 1 cM, 0.5 cM of a marker as described in any one of Tables 1-3; and
c. thereby Identifying or selecting a soybean plant having a ASR resistance allele derived from Glycine canescens.

15. An elite Glycine max plant having introduced into its genome a chromosomal interval from Glycine tomentella, a representative line being PI509501or a progeny thereof, wherein said chromosomal interval confers increased Asian soy rust (ASR) resistance as compared to a control plant not comprising said chromosomal interval.

16. The plant of claim 15, wherein the chromosomal interval comprises SEQ ID NOs: 5, 6, 5 and 6, or a portion of either.

17. The plant of claims 15-16, wherein the chromosomal interval comprises a SNP marker associated with increased ASR resistance, wherein said SNP marker corresponds with any one of the favorable SNP markers as listed in Table 5.

18. The plant of claims 15-17, wherein the chromosomal interval is derived from Glycine tomentella chromosome 14.

19. The plant of claims 15-18, wherein the chromosomal interval corresponds to a position within the Glycine tomentella genome that corresponds to SEQ ID NOs: 5 or 6.

20. A progeny plant or seed of any of claims 15-19.

21. A plant cell or plant part derived from the plant of claims 15-19.

22. An elite soybean plant comprising an ASR resistant allele which confers increased resistance to ASR, and wherein the ASR allele comprises at least one single nucleotide polymorphism (SNP) selected from the group of “favorable” SNPs described in Table 5.

23. An elite soybean plant comprising a chromosomal interval from Glycine tomentella comprising at least one favorable SNP marker selected from Table 5.

24. The plant of claim 23, wherein the Glycine tomentella is PI509501 or a progeny thereof.

25. A method for producing a Glycine max plant having increased resistance to ASR, the method comprising the steps of:
a. Providing a Glycine tomentella plant line, or progeny thereof comprising a chromosomal interval corresponding to any one of SEQ ID NOs 4-5;
b. Carrying out the embryo rescue method essentially as described in Example 3 or as described in U.S. Pat. No. 7,842,850;
c. Collecting the seeds resulting from the method of b)
d. Regenerating the seeds of c) into plants.

26. The method of claim 25, wherein the Glycine tomentella plant line of a) is PI509501 or a progeny thereof.

27. A method of identifying or selecting a soybean plant having a ASR resistance allele derived from Glycine tomentella, the method comprising the steps of:
a. Isolating a nucleic acid from a soybean plant;
b. Detecting in the nucleic acid the presence of a molecular marker that associates with increased ASR resistance wherein the molecular marker is located within an interval corresponding to SEQ ID NO: 4 or SEQ ID NO: 5; and
c. Identifying or selecting a soybean plant having an ASR resistance allele derived from Glycine tomentella.

28. A plant of the species Glycine max, wherein a portion of a genome of the plant is obtained from a wild glycine species through the use of chemically induced chromosome doubling, and wherein said portion confers the plant with increased resistance to ASR as compared to a control plant not comprising the portion.

29. A plant of the species Glycine max, wherein a genome of the plant comprises a chromosomal interval that confers increased resistance to ASR as compared to a control plant not comprising the interval, wherein said chromosomal interval is introduced into the plant from a wild glycine species, and wherein said plant with said chromosomal interval is obtained through chemically induced chromosomal doubling.

30. The plant of claim 28 or 29, wherein the portion of the genome or the chromosomal interval is introduced from a Glycine tomentella plant line or a Glycine canescens plant line.

31. The plant of claim any of claims 28-30, wherein the Glycine tomentella plant line is accession line PI509501or a progeny thereof, or the Glycine canescens plant line is one of accession line PI440935, PI483193, PI595799 or a progeny thereof.

32. The plant of any of claims 28-31, wherein the chromosomal interval introduced from Glycine tomentella is introduced from chromosome 14 of Glycine tomentella.

33. The plant of any of claims 28-32, wherein the chromosomal interval introduced from Glycine tomentella corresponds to a position within the Glycine tomentella genome that corresponds to SEQ ID NOs: 5 or 6 or a portion of either.

34. The plant of any of claims 28-31, wherein the chromosomal interval introduced from Glycine canescens is introduced from chromosome 14 of Glycine canescens.

35. The plant of any of claim 28-31 or 34, wherein the chromosomal interval introduced from Glycine canescens corresponds to a position within the Glycine canescens genome that corresponds to SEQ ID NOs: 1, 2, 3, or a portion thereof.

36. A progeny plant or seed of any of claims 28-35.

37. A plant cell or plant part derived from the plant of claims 28-36.

The application's sequence listing, which the Patent Office published only in electronic form, follows.

SEQUENCE LISTING (5 sequences)

SEQ ID NO: 1 - DNA, 3814980 bp, Glycine canescens (residues 1-1,907,490 of 3,814,980)
cctaaaccctaaaccctaaaccctaaaccctaaaccctaaaccctaaaccctaaaccctaaaccctaaaccctaaaccctaaaccctaaaccctaaaccctaaaccctaaaccctaaaccctaaaccctaaaccctaaaccctaaaccctaaaccctaaaccctaaaccctaaaccctaaaccctaaaccctaaaccctaaaccctaacctaaaccctaaaccctaaaccctaaaccctaaacctaaaccctaaaccctaaaccctaaacctaaacctaaaccctaaaccctaaacctaaaccctaaaccctaaccaccctaaaccctaaaccctaaaccctaaaccctaaaccctaaaccctaaaccctaaaccctaaaccctaaaccctaaaccctaaaccctaaaccctaaaccctaaaccctaaccctaaaccctaaaccctaaaccctaaaccctaaaccctaaaccctaaaccctaaaccctaaaaccctaaaccctaaaccctaaaccctaaacctaaaccctaaaccctaaaccctaaaccctaaaccctaaaccctaaaccctaaaccctaaaccctaaaccctaaaccctaaaccctaaaccctaaaccctaaacccactaaaccctaaaccctaaaccctaaaccctaaaccctaaaccctaaaccctaaaccctaaaccctaaaccctaaaccctaaaccctaaaccctaaaccctaaaccctaaaccctaaaccctaaaccctaaaccctaaaccctaaaccctaaaaccctaaaccctaaaccctaaaccctaaaccctaaaccctaaaccctaaaccctaaaccctaaaccctaaaccctaaaccctaaaccctaaaccctaaaccctaaaaccctaaaccctaaaccctaaaccctaaaccctaaaccctaaaccctaaaccctaaaccctaaaccctaaaccctaaaccctaaaccctaaaccctaaaccctaaaccctaaaccctaaaccctaaaccctaaaccctaaaccctaaaccctaaaccctaaaccctaaaaccctaaaccctaaaccctaaaccctaaaccctaaaccctaaaccctaaaccctaaaccctaaaccctaaaccctaaaccctaaaccctaaaccctaaaccctaaaccctaaaccctaaaccctaaaccctaaaccctaaaccctaaaccctaaaccctaaaccctaaaccctaaaccctaaaccctaaaccctaaaccctaaaccctaaaccctaaaccctaaaccctaaaccctaaaccctaaaccctaaaccctaaaccctaaaccctaaaccctaaaccctaaaccctaaaccctaaaccctaaaccctaaaccctaaaccctaaaccctaaaccctaaaccctaaaccctaaaccctaaaccctaaaccctaaaccctaaaccctaaaccctaaaccctaaaccctaaaaccctaaaccctaaaccctaaaccctaaaccctaaaccctaaaccctaaaccctaaaccctaaacccctaaaccctaaaccctaaaaccctaaaccctaaaaccctaaaccctaaacccctaaaccctaaaccctaaacctaaaccctaaacctaaaaccctaaaccctaaacccctaaaccctaaaccctaaaccctaaaccctaaaccctaaaccctaaacccctaaaccctaaaccctaaaaccctaaaccctaaaccctaaaccctaaaaccctaaaccctaaaccctaaaccctaaacctaaaccctaaaccctaaaccctaaaccctaaacccctaaaccctaaaccctaaaccctaaaccctaaaccctaaaccctaaaccctaaacccaaaccctaaaccctaaaccctaaaccctaaaaccctaaaccctaaaccctaaaccctaaaccctaaaccctaaaccctaaaccctaaaccctaaaccctaaaccctaaaccctaaaccctaaaccctaaacccctaaaccccctaaaaccctaaaccctaaaccctaaaccctaaaccctaaaaccctaaaccctaaacctaaaccctaaaccctaaaccctaaaccctaaacctaaaccctaaaccctaaaccctaaaccctaaaccctaaaccctaaacccttaaaccctaaaccctaaaccctaaacccaaccctaaaccctaaaccctaaccctaaaccctaaaccctaaaccctaaaccctaaaccctaaaccctaaaaccctaaaccctaaaccctaaaaccctaaaccctaaaccctaaaccctaaacccactaaaccctaaaccctaaaccctaaaccctaaacccctaaaccctaaaccctaaaccctaaaccctaaaccctaaaccctaaaccctaaaccctaaaccctaaaccctaaaccctaaaccctaaaccctaaaccctaaaaccctaaaccctaaaccctaaaccctaaaccctaaaccctaaaccctaaaccctaaaccctaaaccctaaaccctaaaccctaaaccctaaaccctaaaccctaaaccctaaaccctaaaccctaaaccctaaacccttaaaccctaaaccctaaaccctaaaccctaaaccctaaaccctaaaccctaaaccctaaaccctaaaccctaaaccctaaaccctaaaccctaaaccctaaaccctaaaccctaaaccctaaaccctaaaccctaaaccctaaaccctaaaccctaaaccctaaaccctaaaccctaaaccctaaaccctaaacctaaaccctaaaccctaaaccctaaaccctaaaccctaaaccctaaaccctaaaccctaaaccctaaacccctaaaccctaaaccctaaaccctaaaccctaaaccctaaaccctaaaccctaaaaccctaaaccctaaaccctaaaccctaaaccctaaaccctaaaccctaaaccctaaaccctaaaccctaaaaccctaaaccctaaaccctaaacccctaaaccctaaaccctaaaccctaaaccctaaaccctaaaccctaaaccctaaaccctaaaccctaaaccctaaaccctaaaccctaaaccctaaaccctaaaccctaaaccctaaaccctaaaccctaaaccctaaaccctaaaccctaaaccctaaaccctaaaccctaaaccctaaaccctaaaccctaaaccctaaaccctaaaccctaaaccctaaaccctaaaccctaaaccctaaaccctaaaccctaaaccctaaaccctaaaccctaaaccctaaaccctaaaccctaaaccctaaaccctaaaccctaaaccctaaaccctaaaccctaaaccctaaaccctaaaccctaaaccctaaaccctaaaccctaaaccctaaaccctaaaccctaaaaccctaaaccctaaaccctaaaccctaaaccctaacctaaaccctaaaccctaaaccctaaaccctaaaccctaaaccctaaaccctaaaccctaaaccctaaaccctaaccctaaaccctaaaccctaaaccctaaaccctaaaccctaaaccctaaaccctaaaccctaaaccctaaaccctaaaccctaaaccctaaaccctaaaccctaaaccctaaaccctaaaccctaaaccctaaaccctaaaccctaaaccctaaaccctaaaccctaaaccctaaaccctaaaccctaaaccctaaaccctaaaccctaaaccctaaaccctaaaccctaaaccctaaaccctaaaccctaaaccctaaaccctaaaccctaaaccctaaaccctaaaccctaaaccctaaaccctaaaccctaaaccctaaaccctaaaccctaaaccctaaccctaaaccctaaaccctaaaccctaaaccctaaacctaaaccctaaaccctaaaccctaaaccctaaaccctaaaccctaaaccctaaaccctaaaccctaaaccctaaaccctaaaccctaaaccctaaaccctaaaccctaaaccctaaaccctaaaccctaaaccctaaaccctaaaccctaaaccctaaaccctaaccctaaaccctaaaccctaaaccctaaccctaaaccctaaaccctaaaccctaaaccctaacctaaaccctaaaccctaaaccctaaaccctaaaccctaaaccctaaaccctaaaccctaaaccctaaaccctaaaaccctaaaccctaaaccctaaaccctaaaccctaaaccctaaaccctaaaccctaaaccctaaaccctaaaccctaaaccctaaaccctaaaccctaaaccctaaaccctaaaccctaaaccctaaaccctaaaccctaaaccctaaaccctaaaccctaaaccctaaaccctaaaccctaaaccctaaaccctaaaccctccctaaaccctaaaccctaaaccctaaaccctaaaccctaaaccctaaaccctaaaccctaaaccctaaaccctaaaccctaaaccctaaaccctaaaccctaaaccctaaaccctaaaccctaaaccctaaaccctaaaccctaaaccctaaaccctaaaccctaaaccctaaaccctaaaccctaaaccctaaaccctaaaccctaaaccctaaaccctaaaccctaaaccctaaaccctaaaccctaaaccctaaaccctaaaccctaaaccctaaaccctaaaccctaaaccctaaaccctaaaccctaaaccctaaaccctaaaccctaaaccctaaaccctaaaccctaaaccctaaccctaaaccctaaaccctaaaccctaaaccctaaaccctaaaccctaaaccctaaaccctaaaccctaaaccctaaaccctaaaccctaaaccctaaaccctaaaccctaaaccctaaaccctaaaccctaaaccctaaaccctaaaccctaaaccctaaaccctaaaccctaaaccctaaaccctaaaccctaaaccctaaaccctacctaaaccctaaaccctaaaccctaaaccctaaaccctaaaccctaaaccctaaaccctaaaccctaaaccctaaaccctaaaccctaaaccctaaaccctaaaccctaaaccctaaaaccctaaaccctaaaccctaaaccctaaaaccctaaaccctaaaccctaaaccctaaaccccctaaaccctaaaccctaaaccctaaaccctaaaccctaaaccctaaaccctaaccctaaaccctaaacccctaaaccctaaacccctaaaaccctaaaccctaaaccctaaaccctaaaccctaaaaccctaaaccctaaaccctaaaccctaaaccctaaaccctaaaccctaaaaccctaaccctaaaccctaaaccctaaaccctaaaccctaaaccctaaaccctaaaccctaaaccctaaaccctaaaccctaaaccctaaaccctaaaccctaaaccctaaaccctaaaccctaaaccctaaaccctaaaccctaaaccctaaaccctaaaccctaaaccctaaaccctaaaccctaaaccctaaaccctaaccctaaaccctaaaccctaaaccctaaaccctaaaccctaaaccctaaaccctaaaccctaaaccctaaaccctaaaccctaaaccctaaaccctaaaccctaaacccctaccctaaaccctaaaccctaaaccctaaaccctaaaccctaaaccctaaaccctaaacccctaaaccctactaaaccctaaaccctaaaccctaaacctaaaccctaaaccctaaaccctaaaccctaaaccctaaaccctaaaccctaaaccctaaaccctaaacccctaaaccctaaactaaccctaaaccctaaaccctaaaccctaaacccctaaaccctaaccctaaaccctaaaccctaaaccctaaaaccctaaaccctaaaccctaaccctaaaccctaaacccctaacccctaaaccctaaaccctaaacccctaaacccaaacccctaaaccctaaccctaaaccctaaaccctaaccctaaaccctaaaccctaaacctaaaccctaaaccctaaccctaaccctaaaccctaaaccctaaaccctaaaccctaaccaaaccctaaaccctaaaccctaaaccctaaaccctaaacccctaaaccccctaaaccctaaaccctaaaccctaaaccctaaacctaaaccctaaaccctaaaccctaaaccctaaaccctaaccctaaccctaaaccctaaaccctaaaccctaaaccctaaaccctaaaaccctaaaccctaaaccctaaaccctaaaccctaaaccctaaccctaaaccctaaaccctaaaccctaaaccctaaaccctaaaccctaaaccctaaaccctaaaccctaaaccctaaaccctaaaccctaaaccctaaaccctaaaccctaaaccctaaacctaaaccctaaaccctaaaccctaaaccctaaaccctaaaccctaaaccctaaccctaaaccctaaacccctaaaccctaaaccctaaaccctaaaccctaaaccctaaaccctaaaccctaaccctaaaccctaaaccctaaaccctaaccctaaaccctaaaccctaaaccctaaaccctaaccctaaaccctaaaccctaaacccaaacccaaacctaaccccaaacccaaaccccaaacccaaacccaaacccaaacccaaacccccaaccccaaaccccaaccccaaaccccaaaccccaaacccaaccccccccaccccaaaaccccaaccccaaaccccaaacccccaaaccccccccaaaccccaaaccccaaacccccccaacccaacccaaccccaaaccccaaacccaaaaccccaaaccccaaacccccaaccccaaccccaacccaacccaaaccccaaacccaaacccaaaccccaaaccccaaaccccaaaccccaaaccccaaccccaaacccaacccaaaccctaaaccccaaaccctaaaccccaaacccctaaacccaaaccccaaaccccaaaccccaaaccccaaacccaaaccccaaccccaaacccaaaccccaaaccccaaaccccaaaccccaaaaccccaaaccccaaaccccaaaccccaaaccccaaaccccaaaccccaaaccccaaaccccaaaccccaaaccccaaaccccaaaccccaaaccccaaaccccaaaccccaaaccccaaccccaaaccccaaaccccaaccccaagccccaaaccccaagccccaaaccccaagccccaaacccaagccccaagccccaagccccaagccccaagccccaacccaagccccaagcccaagccccaagccccaagccccaagccccaagccccaagccccaagccccccaagccccaagccccaagcccaagccccaaccccaagccccaagcccccgagccccaagccccgaaccccaagccccgaacccccaagccccaagcccgaaccccgaaccccgaacccgaacccccaacccgaaccccgaacccccaaccccgaacccgaacccccaaccccgaaccgcaacccccaaccccgaaccccccaacccccaccccgaacccgcaaccccgaaccccgaccccgcaaccccgaaccccgaacccccaaccccgaaccccgacccgcaacccccgaaccccgaaccccccaaccccgaaccccgaaccccccaacccgaaccccgacccccaacccaaaacccccaaccccccaaccccaaacccccgaaccccccaaccccaaaacccccgaaccccccaacccgaaacccccgaaaccccgaaccccgaaaccccgaaccccgaaccccgaaccccgaaaccccgaaaccccgaaaccccgaaaccccgaaccccgaaacccccgaaccccgaaaccccgaaaccgcgaaaccccgaaaccccgaaaccccgaaccccgaaccccaaaccgcgaaaccccgaaaccccgaaaccccgaaacccgaaccccgaaaccccgaaaccccgaaaccccgaaacccgaaccccgaaaccccgaaaccccgaaaccccgaaacccgaaaccccgaaccccgaaacccgaaaccccgaaaccccgaaccccgaaccccgaaccccgaacccccaaacccaaaccccgaacccctaaaccctaatttccccctaagtatttaaaaaagaaactacaaacttgtattaaaagttaagaaaatactgtctcaacttgtcagtgatttctgttttcctgggttcatcatccgacccataagagatacaatatcttgtccccctttaggtcgtgcattggcagccagatcatgtagggttacatccttaagaacaacaatccaaatctatcaaatatatatagtatactcaatgtcagaacaggttcttatagagtgcactaaatacaagcctttgattaaaacaatcaaatatttaatatatcaatcaaatttcaataaaaaaaatggaaattaatatttaatgtatatttatattttatcaatattttattctaactacatacattaaaataatttttattatatatctatacaaaaattattttttttaaagttaaaattttcaattaaaccaaatttattaatctgaaacaagcaataaatatttcaatttatattgttcttatgttctataattatagttccgtttatttccaatttcttcttccttgttttttgttggtaaaaattacattatgttgaatctgatgcatggccttttgaacctacacagatattattgatctggtgtcttacagatctattcaaatttgtttattgcctaaactaacttttaagctgattaggaaaagtattattattcttaaattactgaactttggtggccagatgatgggaagggttttgtttcaatttttggatcaggagtctgagtgatatgtggttgtaccacttggaaaacgaataataaagattgaagagtactgaaacagaatacggatacagaacatatgttgagattttcctgaggagaatgtccagtgcattttatgaccaagtgtattgatgtcttgtacatattagtggtatgagatacactaaaccctacaccccacaccccaaaccccaaaaaaaccaaaaaccctaaccctaaaaatgtcaaacccccaaatcccataccccaaaaccccaaaacccccaaaccccaaacatatcaaatatcataattcaggtttatcaatagaggaaacacagctcgatacactaattgttacaaattatacttaccacttccttcccacatcatctgatgtctttgtcaaatgaacttagtagtatagtaacactcctaaacaggatatacatcatataatcatatctcgggaaatcctatcccaaagcacaactattatctttactctcaacaacagtatccctagccaaaaatatctacacaatcatgcaaaagaacaaatcaatgaatcttaacaaaaagaaaaaataagagcaaaaagtcagtaaatgagaaaaaccaatatagcataaatacatacgtaaagcacctgggatagatgtagtcactattgtgttacagttcacaaaacattgtacacttccctatatataaccaatgactaaaattcacatatgcacattttttcaatatcattagatggaagcatatttttttctagttggaaagcctcattttcaaataaagcaaacagagcagcataaaatctagaaatttgaaccaaagttatcagaaatgtaaaggttttttattcatattgtacaatttaattatattctcaaaaacatcaattcatgtcatcaatacaaatctgggaagacacaaattgtggctagacaagattgaggattctactagtgcatcatccagataaagcccacatcagttatggtcctgtattgacccaaatgagaaaatccacctattttcacaaactttgttgaggtgacgacaacagcaaagatatttaattgattttcttatatggtggcatccctcattttgagccaaattttatgaagattgagttttctagaaacaaaaattctttcaatgtttgtcacttataaggatatagtaagaaattgcagcagcaagcatttaagtatattgaacagtatccatatcaagttattaaaattgagtactgaaacaactagaaaatgattagtgttcaggtaagaaaggagaaaagagactcagaataagaggataccaaattgttgtggtatattatgattcaacacaaaaaaaaaaaacagaacattaaaccccattagtgatagtactagctaatagtattaatcataaagaaatattataaaatctagaaaaaactacttagaaatcatacgaataaagatattcagatatacacaggaccaaacattctagcataaacataaaatttgaacaattacagagtatttgattaaacactcaaaaaaagacctttgaatcacaagacaatgattataataatgaagtaccttgcttgcaagtagaaaaaaagtggccattgaaccagaggaagatccccagaattcctaggcattaaaagcaactccatttcgctgtgagcaaggaaaacatgaccattcaggtattaattaagaaggaaagaagaaagataaataaaaccaagaaaatgtatagccgcttccatgactaacaagttggttacataatcctcctcccttagatttcttatgatctcattccaaaagggggcaaaccgagcagcatcaaccttgttattcttccaacctttggatgaagagtaattgaataagtaatatttactcaagtttaaaacaaatgttcagcaaacatgagaccagtgtactgtaaccttcccatcaacataaaaagtttcttattttagtgttagtacacaggtatcaagcaaataaacatgaatttagaccaaattatgtcttcctttatctatagcaaaaggctgacctgaacagacgactgatgggaactcctgaaaatataaaaattgagaaaaactatataagcttatacaaaaaaagtactatttaaggggaaaatctgaaagaagagaggatatattctcagagagctacaacagagataggacacatacatatacaattatcttccaaaaatacagaatgaagatcataaaacagaaaaagcacatttcacaagcagcacctttgggtagaggaacatgaagtgtgtccataaaagctccaggaaactgctcaaaaagtttgtgcagtgcttccaatgacctaatctggtgaccgcatacaaccacaaaaaaaagttatgccaactaatcttaaattcttaaatatacaggacaagtgtgtaaaacacataaatatctagaagataaatctgaaagaatgggaattaacaaatcggaaacagccatcaaaacactcaaaaatgggagggggaagcaattttacaaaacagttaaattgaaggtttttccatcacctaaaagcttttatactatttattaactactaaaccagtgaaatacaaccctcaatactaagttcagcaactcctgaagatataatacgcttacttggggacttcttactccagctgttccaagagtctccgctagtggaaccccgtctaatattttcaaactcctgaagatgtcatttttaaatgctcaaacaagagatttttgctgcaaacttttattgaatgcaaataaagctaaatccaaaaaagctatgaaactgcatgcataacagactatattaacaaccctaccactatacagcaaactttaaggacctcttgtcagacattcttccccattgacaaagacagattaaaaaggaacaacatatcctccttttatgattaaaatatttaaagaacggggaagaggtaaacaaacaatgaaactatacttacagcaaccacaggagtccacacgctaacaactttcaaagtcactgattattttaatctagttattatgaaatattttctcacattacaaatatgtatgaagtttgtaagaaataacacaagatttaagtgacacaattgcaaaactcttcacttgttgtatatattataaaagcataatatagcactcgagttggaaattttaaaactgatcataattttaaaaaagggatgaccgatgaccattcctcattttcatcaattcaagatagagctttgtttcacatggaaagaagcaagttcttgacagaaaattgaattcaatgtcatgaaggaactcaacaaacaggcaacaataactatttttcttggatcaattctttcatttgtaaaatttggccaacctttccttcccctcgaaaccctaagacccaaagaaaacctaatgcaaatcacatgcatgtcatgtagcgtttctttaatgtaattgtaatcacagagagacaaataaggccaacaagcagttatagattatttaaaggaaatgaaaggaaataacagaccggaagaagaggagttgttgtcatgattgttcttccccaaggcgctgacaacaaatgggcgataccctttagagtaagggtttctcctcaaaacagtgatctgaaacactttgctccttcccaaattgaagggaatgggtctgtggcaaaacgaatttgtgtggaaaaggttctttgcatgaacagcaaacagatccattctcacttttttactgcctttatcgtttctggatcgatgacaaacggctaagctaagaagcgagaaggatagaattggaaaaacaattttagaaaaataaagatagtaagtggagcaacaacagaagacgatcaccaagaggatgaagaaagacactagtacgattatgaaaacgacgctttggaattggaaagagtgagaatatgctttatttaaaccgaattgtgtggaggtcagcactggcgtacgttagccacaacctcctatgcgatctaaaattgcactggcaaagataagattaatctaatctgattgcttgccaatagttacctatccattcctctctccaatagttacatatccattcctctctctccaaatcagttaactgaattcaactgaccttaatctaatctggtgggttgtaaattgagttaaattgattaatcattcttttttttttggaaaaaaataaatatctcgtaaattcagtcattcattaaataaataaataatttaaacataatatcatagtcacaaaaatatttcgttattatattattttatcacaactattatttttttaaataggggtattatcatcacaagttaaataaacttaaaataaaataataaaataacatgaaaatactcttatgtgattcttattataagacaaatttaaaatgaattgatgaattttttataaggcatttcacaattcttatgtaatatttaatttttattaattgttattattaaatatttttttcatgtcttaaatataaacaacacaaatttcttattttttatttgaaatataaacaaatcttaacttataaagtcttatttaatgatattatacttagaatatcctttatttaatatagttagccttttttatgtttaatattaaatttcaatgaaagattgcttaagaaaaaatattattttttagagaaatgataggaacaccatcactcattgacacacattttactcattggctggaatttattgaaaataaaaaatctgataggtctcacatcacatttaatggttatcttgattttataattttcaataaattttcatcaattatagagtgtttgaagtagtgtgttagagagagtgtttctaatatttttctattttttaattagaatgacataatttaatgaagttcactaatttcctaaataagtgtaaaacatgtctttttcttcttataatcaagactcaagagtcgagagagtatttgtacttgttattggtggtgattcacgactcttagactttaatattttcgcatcactcataacaagttaatgattattaataaggataaaattgatacattagtagtatttattttaaaagtcaataaaatgaattacataaattatttttattgatttgtgtgattatctccaaaggacctagggggtaattcacaaaatatcatgtccaatgagttctccagggatattttggtgcaaaaaaagtgttgttttgcctcaaaaaccaccaaatgggtgggatggaggtggtaaaaacaatgtcatgtttaaagataaaatgacggggctcaagtggaccttccaaggagggaagaagtgaatttgatagtaaataacatattcataattgagtttgaagagggagatcatatgaagccttagtttcttcatgatgcatggtaggttgaaaacaatatggaaattgacagacaattttgaagtggtggatgtagggcacaatttttacatggtgtagtttgatcttttgcaatatagggaaaatgtgattagcaggggtcaataactggtctaccatcaatgcataaactcacttgtagagtaacatcttccaaggtaagcaacatgaaccaattattgaagtcagattgaacatgttttcttaatgaaatgacggtctatgccaatgtgcttggatctctcttggaaattggatatcaaattgtatagttaatttctaataactcacaatacactgtaattccaaccacataatttcataagaattatttagtaaaagggattgcctaagaatatctgtaatagcaataatttaaaattttggtatacaaatctttttaagtctttttcacattagtattttagatttattaactatttgtatccttttatgaatacattcaaactccacatatctagatttcccccaaaatttccatagagttttgtaagactgagaagatggcgaagagatgtcttgtccttttcttgatcatagtctaaacctatatttgtccaatggatccttatgacttttttaaaagcgtttttggcatgtttgatccatccaaaaatcttattaagtctatagtaagacatattatttctcctttcagttttaagacttcaaataaataatcaatcttatcaattactttagctctttcaagactttcttctaaagtcttaacctttttctcaaaaatcatagttgtttctttagagaaatattttcacaaacaacttgtactttctttatacttatattccacaaaaatcatatgtgtgttttgaagaacatcataagccattgcctcatcatttgataaagattcagatgaactactactatcagactcaaaaaagttcttacttatcatttattgattcactcgatgcgctcttaaacttgtccatgtgtgctttgaggaaggctttttcttttcaaatttttcgtctttcttgattggactctccaaccttcaaactatgattttttagtattttcaacattcaaactataagatttaagaaaataaattgtgagaaatggattaatttcaaaagagttactcttagataaacttaatccatcctttattattattattattccctccaatgattctaataagtagttaatattacccattgaacaggaaaaagttttcaatggtaagtgatagacatatacaatagaaacttgtttttgttttaaggggcatttttatcactaaaaaataacaactttgaggggagtttaatagcaatggaggatggaaatagcaaaagatgaatagcaaagtccatcaagaattctcctactctgcaaaatttattttggatatgtttttgggtatcttaagagacagaaacattatgtttttagtaatgatcatatttgggtaagtatttgccgctagttcttgtcttttcaccaatattttgttttatattaataggtgttggtatgatgctacttgtaattaagttttatgcaacaatccttgcccattttgtgcttggatttgactattaataattatacatttataagagaagaaaagtaaatttgaattatttaattttgggagaggatcacaggttcattttttaatataatgacttattgcttgctaaaattttcttattttctttattattattagtctttagaaaacattgaataatttaggtaatgaacaaaactcattggcctatttgggctcattggcctgtttaagcctataggtctattgacttgtttatagacccttatatagaagcaaactttcaagtcagaccagacttttaaacaggtcaattaagacttaaaaaaatacatgtaataagtaaataagtcaggctcagacttagtaattatgatgtaaatcaagttcagacctttcaaagcctgatcaaagtctgacctaacctatttccacctttacttacatctaaatcaggagaatgaatcattaatgagatgtgagacccaccaaaatatattgtaactcagaatagaagaaaaccaacaaattcatctgaagatccctgattttttcttctatttgttaacaggcccgagaagttaatagtacaattaataacttattgagaaatgaaatattcaatcagattacaggattagaaaacacagaagcacaaacattatatttaaacatggaccacgataaactacacaaaggttattaacataccctaagaggaatcaaaatggacagataggcatacattaaaaccctttgcaatcagggcagtcactcttttaaactaaatcttgcattttgaacctttactgatagctttaacttctgttcttccatatcctttagcaagccagcaagtttgctctataaacttcacatcgttgatttgtgacctctaactcagcagtcaactctcggattttcttttgcttctcggcctgttgcataggatccaaagggaatttgtttataataccacgtgtattaacaaaaatacaggccacatattgttaaaaatcagatacggataaattgaaataataatttcttattcattcactcactcattcatccattcattcactcatccatcacctcttaaatgaggaatatttatacaagtaatgttaacatcctgagcacaatattaggaaacaataatttaaacttattcttatctagactattttaacaacctgttcctatctaagagaaacaataattcaaattcaaattctatattcaacacatataggaagatgttgtcagttctcactctaatgtgtacgcttaggaaaatccaaatacacataaattttgtgccataattctataaaataattagtgaaaaggaaactttatatatagcataatgttaaaaacttagcaagatgagcacaaatataatccatgaaaacagcctcaattttaagaggttcaatttaaacttacaggctaagcaaattcaatttcttaaattactggagaagatgagaaaaaaagatcaccatggtcatagaagttgcagaagtccatcatagacaaacaagcacgttataaccacaacataagcaatacagattcttcacataaaatagtataaatagcacatatttttcaagggaaaattacaatcagcctcttaaactttgaaccttttgcaaaatggcaccaccaacgttaaatttgtcccaatctattaactttaaaaaatattacaatagacccttctgtttagctaccatttaaccacaagggaagagctacgtgacatctaattcattcattttatgaaaaatctctttgttttaaaatataatttacgaggtttttaaataatcatcaatttaaaaaatagtaagtggcatcgagtccaaccaccatgccacaacatcaccaaacagtaaccatgtaccacaaaaatcttgcacaaaaataaatgagacagagacagagaaatctataatgcattaatcctaaaccatcactcaccatcaccaccacccactgtcaccagccagaacataggttaaaatcaagatgcaacctgtctacaactgcatgcacaccaaagcatagctccccaaccaaaatgtgcaaacccactaattctagagatttgatcatcaaagtgatatttacctcttcctaattcaatcttcccagtttttgacaaatatattagatttcacaatttacttgggtttttgtgtaaaaagataattgtgtttttctaatttatgaacatttattaaataaacaaataaagcagaaaaaaatggattgtgaggatttggcgatcatggatggatagtcttttgacatgtcatcaagtgttcacatggtaagcacacctctgtaatgagttaaaggatgctataaaaaacaaaaggatttactggcatatgagaaatactagcaacacactaacattttctttccaacaaactctttataaggtagaattcatgttggtcccactaaatatgttggtcacatccccaaactagtagaactcacatgcagttcaactaatatgagagagtcttaagaagaaagtattagagaatatattgctagtttttttttttttttttacagccaataaaaagagattatattaaaaaaaaggtacaaggggtaccctaacccacatacaaatttgcataacagggccaaacaaaaagccaatcaaattgcacaagatattatcccttcccatcccaacgatcagcaataaatacccatctataagattccccaacattaaatgtctcattcaattatcatagcgttaacattgcagcccacaaaaacccaaggagaatacattgctagtattcctcattggtatattatgtaaagtttaaggattaattgagacaagtttaaagttggtggtagcaatttgaagaagatcaaacataaatgttatttacttaccacattgaaaagcattacctagaaaacaacaagcatgatttccaagtgccagcttggaggttgtacgcggggggaattgccccttccttttgtacattatttttttttgcttcaacacaaaaacatgtacagtaatagtatagttccttggatgcagctcattgtagaatttgccagggaaagactttgtgtacataattgttctagtgagaacctaatggctttatcatctaaggaaaagatcttaagttcaaagaaactaaccacagattgattgcttggaacatcttcatctgctacaagcaattcacccctgcttccattggttactatagctccctctgctgttccagaactctgattttttattgcgcaaaccttcttagcagcttcttgcagagctctcatggcaacatgatagatttggattgattttgcaccttcttcaacatatttgattgcttcttggcgtaaattgttataacaaactgttacagactcacgagaagtacttggcaattcagatgcatgttcatctaacaatgtaccggttttagcattccttgtccagcgtgtcaatacatactgagatggaagagtaagaacatttttagctctgaagactgacagtatatgcctacaaataattcctgaatattcaaacatctgacaactgcaactagctttcgtctcaaaagaattaaaagtcacaacatgagatttttggttttccccaaatttggcaactcgatatgtagtgattgtttctgaatcatcaatttttgtagcaggatttgcaagagtctctactaactcctcttggaatttcatgaatatctttctcgtgtaaagacccgcagcttgtttttccataggagatggtgtttttaaaactggactactattagtagtgtcataatctgcttttaattctctttcatgccaacttgacacagctttctcgtattgtctaaccaatacctgtagagtggtggatgaattcacatatccatcaaagaaagaattcaaatattcattttcctcattcaaagatatctctccaaagaaagtctcccgcaagtacacatgaacccaatgttgtcgtgcgctgtacattgactgaagccattcattgtccatgacgtagaatctttccaagagtgagtgccaataagactcaaactcatcaatagtctcactttcttgaacgcatttcttgaattcagtttcaaaagcaggatgtgactgacataaatgagccagtttgcctcgggtttctctgaatatgctccatttacaaaaccgatggcgagttgaagggagaacttgggcaacagcaacttgtatgaaagggtccaaatctgttgtaatagagacagggtggccgccagacatggcatgaagccaagtcctgaatagccatataaatgacaattcagattcattgaaaatcaatgcgcaaccaaataacacaggttgcccatgatgattcaacccagtgaaagaggtaaatggaacccggcatcggttagtcttgtaggttgtgtccaatataacagcatctccaaaataagagtagtttgttctagatgttgcatcagcccaaaatatattcccacacgcgagattattgtcatcctggactgcataaaagaaagcaggattatctgcctgcatgcgcttcaagtagtccaatacatgatgacccccaccaccaagggtacgctgtctagtgatactcatttgtgctgtaagggacgaggggaattatgatcaggattataccaaatatggtgggttgacatgttacagagtcaacctacctaaattttttaaacaaaatccataaattaatgctgaaaaggtaatcaattgagaacttcaaactcataagtcataatgaaatggcaaagattctgtgaccctgctatgtctaactaatcccattacgttagagacgaatgtgaagaacaatactatatttttaatgactaatgcaatgatattactataaagcagattatcaacttacatagaactcacatagataacacaattagccagacatatataggttcaatataagctgggcctcatttttttttaaagaaaaaaattatagttaaaatctacaacatgtgatatacagatgcagcttacaacccctttctatgaacacgaaaactctaatatactaaataatcaacaacataaataattttctgaaatatttcttctgtacgcgaagaaccaataattggagcaactaaacaagaacaagtaaacagcccagaaattattatttaaaaattacggtcacagcggctgttgggggtggagtcgcgacggtgcaagctcgcaaatgggtgacaagaggtagcgtcccgaccaagtgactgactgcggtggcgtcgtgggcgtctgctggatgtgctcgcgatagctttctttcttaacggctgaccgcccggtggctgagagagcaaggcgtgagggagggggagagggagagttgggacttgggaggaggtcgtgcggctgaactgagttgacaactgtgaggtccgggaaaggtaaaggatgtgttttatttgatttgatctgatttgagcaattttgattatgattattaatgaaacaaagacactcgactcccacttgaaagtcacttatatatatagtttgaatgtaacttatttaaaaaaaatgtaattattatcgttgaaagttaaaataaaatattatgataataaattgagaataaaaacatccaaaaaaagatgacatcaaatataattatttcatttataataattataaattagggtatgaaaagatgaaggggatacatattatttaaacaaaggttttttatattgtcaaatttattaagaagggtaaataaacattatgatgttgaatttgtaaatttgtgataatttaatttatgaaaaatcaaaatttaaatttagttaatgtgtgataattacacctcatttttagttttatgacttatgagaccatttttgtcattaagcaatagttttaaaacaccaatttaatattaagttatattttttaatattaatttgaaattaagttaaaaaaataaaaattattttaagatgttctctctcctttatcgttgggatgaaaataggtcgaccacctataaggagctttgacctgacctgacctgacttgtttattataaagttcaggctaagactttttgaaaagtctgtttacataaaaaggtcatgcttaagcttttaaaaaaaatttttaggtctatcaggttgacctaattaatatatatatatatatatatattaaaacttaaaaataatatatttatttttctaaaaatataaatttccttattatgaaggtggatgatcaatcacttcaaaaatcaccttgaaaatcccataaaatgatcattacttatttgaaaatataagtaagatgttgagacattttctatttgaaaattgtttatttaactttcctaaattgatttaaagtgttttataaaattaattttcttattaaaaataggctttttaataggcttgtaggtcaaattaggcttttaaataggtcagaccaagcttaaaaaaaatcctatgacaggtaaataggttaggccaagctttatgtttttaaatcaggcctaaccaagtctggtcttgtctgacctgtttccacccctatttgtcgtggacacgagctaatcctgtgacctaaacctcatcatgatctcatgggaagagcttgtgtgtcaccaccaacttcttttcacaccaaattgtcaacgacatatcttcgattgtagaaaatcgtataacaaatccacaacatagtccctaacttccaattctcacgccatcaaaagtgaaatcctcaagttccaagaatcaaaatatccctcttgttttagaaccaccaacctccctccacaaattctctttgcaaaccttaagcaaaaatcactagctaaatcaaattcctttccaaaacactctatgacaccatttcaacacccttctttaccgtcatcttctcaatgcaaaatcgttttaacaattccaaaaagaaaccccaaatagagagaaaaggtgtaggatttggttaaggttacaatgttgacaaccagccaattgaaatgggttgggtatgccatgcggaacatgagccaaaaaagaaagtgttggtttggtgttttttttttttttgtctttttttctttcaaaaatgggtattgttagatgtggatggaaggtttggggaagaagatgggaccagtgaacgttaagtagcttttgatgaggaagataaattttaaaatattaataaaagagcatgtggcggccaaaaattgtcattatatgtaaattgattataataaatttaaatataatgacattttttagccttctttcgggtggttggatgttcttgatttttgattttcaaatggatttttcaatacaaaacgtgtttaacaaaaataaagttgaaataatttttaactcattttcaaaacacttttacattcattttgaaaatcaagatttttttttttgtgaatttgatttttagtttaaaaaaaaaatacaccttctttgcatttggcaatgactttttctattgccaccatcatcatcattgacactattatttggaacaccctaaaatcttttccataagattgataaacacccaagtattatttgatcattaaatcattcttgacttttcaaacaatagtttgatgaaatataattcaaatcaattgttacatagaggatatacaattaagaacatattccaaagaaatttaaaaaaaaaggattgcacattaaacacttgtgtatgaccatccaaagacttgtaacaaagcaaagacaaagcttgatttttcacaaattcaaaagtcttatatgttgtgccttattctttatttataagcttcaatgtgactattgtgggggaattaaaaatatatataactttttaagtacaaatcatcctcctaaagtgtacccgtgtataagagatgcatgggaatgcatcagtcaattcaggatcaacaacatttcttaggccttgatcttaaagaagtgacttcaacgaattgtaagggcttgatcgattagcaccttggcattccatcaaacaatcgaatggcctgtgtagaatgtaagggtgctaaaataactagtatgaattgaactgaactgaattgaaattaaactgaaacttaattatataaaactcaaactgaactatttggtaggttcggttttataaactgaactatgtagagaacaggtcaattcacaccacgttgaactgttttgaacttttgatattataaaagaattagaaaacgacgttgtagtttatgatgtttattacttggaatcataaaatttgaagtcaggagagacacccattgaatttgcagaaacgtaacagatcattgttctagattgtatggaatatgcaatgctagcatgtacatagtgtctaggttttgcttcaagcctttgaaacaatatttattatttcaatggatgcatgtcagttatttttgacatccagtcttaatgtatttggtctagcttggatgatacctttcagattcaatgctgttgtaacttgtaaggtattttacctgcaattgctcacttattcaaaatttctcttagtttttattatgcaattgaggttatgatagttataaaaattgaaactgaatattagatgctttatttcacagcatataggtttgcattttgttgctgaaaaattggaacaaaataattaaaatgatgggggtgaaagaatgagagcgacaagagaaataggttgtacaaaaacttgaatattgttgatagagaattagagattgcttagaactaatgttgcatttttcaaagctattaaatcaaatatttcagttcaatattttaaattaaaattgttaactaagttgttattaagaactgaactatttttcttcagttcagttattaagaactatttttcaaattcaatttgggagaaaattgaaacaatgaccactcccactagaatgtctcaaaacgcttaactccgatcctttttttgtatgaccatgtaaaacattatggacaatttgattattatttgacattacattagctgtgaatatgtggagtttatatgtattactagtatttttttaaagtttctttatttattttaaacaaaactattatgagtttatttgtttaaatttatttattaaaaaatgcttattttaataaaataaaggattagacaaacacattataaaaaacaaaatttcaaatccaatccggttgtctaggttgggtcggatctaaaggacctaaaccatacatccgggtacccgtgcgtttaccatgtggtacatgttgcctggttagcttacaattccttattacgcaaacgtaggttcaggaggcagaggctctcaaccagcaaatgacggagttatgcttatatagcgcttcatccacgctaattcccaaatctccagccgataggataatgaatctgtgaacggactgggacgagatttcagttattttcctcgatcagtgatattattatgtgagcaaattctatgatcttgtttttttttttttccttcatcgccgagacgaaaatgtccgcatcgcaatctcttggaggtccttcccgctgcggcagagttgtcggtccatcactggacaagataatcaagaacgccgcctggcgtaagcactctcaccttgtctccacctgtaaatccacccttgacaagcttgaatccctctctgagtcctccgaaccgtctccaggcgacacccaatcccctattccaggtctttcctcctcagatgccgactgtgtccttcaacctctctttcttgcgcttgactctgcctaccccaaggttgttgagcctgctcttgaatgtacctttaaattgttctctcttggccttgtctgcggggagatcaatcgccctgataactcgagtgcttcacagtccggcgttgtcttcaatatgattgatgctatctgtaagtcgggtggccttggggaggaggcgattgagctgggcgtgctcagagtcttcctctcagctgtaagatccccctgcattttgatccgggcagattgtctcattcaaattgtgagaacttgttacaatgtgtacctcgggggggtcaacggcactaatcagatctgtgctaaatcggttcttgctcagatcatgaccattgtcttcaccagagtcgaggaagactccatggatgtctttgttaaacgggtttctgttagtgaacttttggaattcaccgataagaatttgaacgagggcaattccatacacttttgccaaaattttatcaacgagataatggaggccagtgagggttttcctctcaaaccatcgtctatatcacctcctctggaagtgcagaatgtccacacaccttcgcccaaagcagcggatgaaacaggtaccgacaagttcgataatgaagctggagctgatggaagtaaaataagggaggatgggtttctactttttaagaatttgtgcaaactgtctatgaaattctcatctcaacagcaccctgacgatcgtatcctcttgagagggaaaattttgtccttggagctccttaaggtagtcatggatactggtggttcaatatggcgcgggaatgagaggcaagtagtataatacttactattcctgtacaaccactatttgtagaatgtaatgtaataattcacgcattatgaacttttattctattcaagggctttttgaagtgagactttcaattttgtagagaaactagtgaatttcaattacttgcatttttcgttgagttttgaactttgaactcctggtttgttttgttgtagatgcttccactcaaacccgtttaaaagtcaaacagttatttatgtgtccaccattcccttctttagttaacaggatcaaggcaaacaatttggtgcaaatttgcagcccttaaactgtaaggtcactatttttttctttgaaacagtgtttctgagcttcttggagaatgtttggtgtgtcctctactttggaacaaatttggtaaattaaaacgagaccttaaagtttggttgaggatgtcatttagatagtcctttggtgtgtttggttgtagtggaatgctcatatctcttaggaaatctctttgcccttgaacttgtaagatgatgggcttatatttatggtttttgtttactcatatctgcttcaagagaactgcaatttcttatgtaaagagaaacagctcagccttgctacagttttttttttttattattttttttttatcttgttgagcggtaaagttgtgccttggtgacttgttggtcatgggttcgaattcggaaacagcccctttgcatatgtaagagtaagtctacatacaatatccctcccctttatcttcgcatagcgaggagcctttgggcaatgaggtaggtagttttgagggcgagccctgacataccggtaaagttgaactttggtgacttgttggtcatgggttcgaatccggaacaacctctttgcatatgcaagggtaagactgcacacaatgttcctcccccttaccttcacatagcgaggagcctctaggtaatggtgtacgtggttttgagggcaagccctgacacaacggtaaagttgtgccttggtaacttgtggtcatgggttcgaatctggaaacaacctctttgcatatgcaagggtaagactgcgtacaatatcgctcccccttacctgcgcatagcgaggagcccttgcgcaatggggtacgcagtttagaaggcgagccctgatacaacggtaaaattgagccttggtgacttattggtcatgggttcgaatccggaaacagcctctttgcatatgtaagggtaaggctgtgtacaatatccctcccccttaccttcacatagcgaggagcctttgggcaatgaggtacgtggttttgagtgcgagccctgacacaacggtaaagttgtgccttggtaacttgttggtcatgagatcaaatcaggaaacagcttttttgcatatgcaagggtaagactgtgtactatatccctccctcttattttcgcatatcgaggagtctctcagcaatggggtatgtaaattatttttttttgtatcaagaactttcttttcagggggtatcttatcctaccctagttatattctcttttttctctcaaataaaattgctttttcaataaaaaaataattatgtactgtttttaggagttaagtagctaatatgcaacatttttttattataaggaggtgacaagtttattaaacatataatgtgataatacacataaatctacctactagcctgcccataactttttttattatttgttggttcaatttaagttgaagaagttttggatgtaacttgtttcagctacttcttttttaaatctctatatgatggcctctttgctacgtgtggtgttttaaagaatatttcttgtatatcatgttcttcatattgcttctttgtttatctgctctttttatttcaagaaataaatagacgatcctttgattttttggtggggttgtatactagttatcggagttagagaattctcaaatttatgacccatcaatgttttcaattgatatccctttttatacataaaaaagatcttttttatttttatttttatgtataaacataagatggatgattgtatatggtcttaaaacaaaggcatttcattaaccacacaatacattaaccactaggttctgctacatggaccaaacaacaccattgtattttctcaaaatcctagcctttagagaggtcatttagatccaagttctttctagttgttttgcttttttttactttgccttcctctacttgctatcctccatctgatcaactcttcttagtaggccttttattggttttcttcgctcatggacaattgtcaaaccatcttttttctctacatatagttgttgatagtgtgatataatcatgctatcatgttgatgcatagcatcatgggagctgataattatggctagcctgtcagtgttttcatggagtgacaattccagataagatcaagcatgctttgttgtcgtatcaaccattagtccatcacactaacgatgggctaaaatcccactttgccgaccctctttcttcattttcctgatgtaatactgtgacaagcaggatgtttcccctggttaagtccagaagcataatattgagccatgacattggttagctttgcactcatatggttgaaataattgtttcaagaattaagttttggagaaataaagcatatgcaatgtgactaatatgtgaagtcaaacaacctttaaatttcctcgaatacagttttacatgaagcaacaaagcacataaagatgggcttccacttcatgcaagattttgtctagttttatggcactactagccttggaaatttgaataaacatgttggaaataggagtatattaggagataagagcctctttattgtttatttttccaagtagcctagatacttggtatagctaggttcattgcatcttagaaagtcgtgctgtagtggtactttaatattctcttgtaaattgttttggcattaattaacttttcttgaatataaataagtccattctgttggccggagaaaatactcaacctcaagcacattcagaaaattttcctttctcattttctcacaaaataagtaatagatgtgtttgttaattctcttgagggtctttggatttgctacattttgtaatagcttggttcatatggtttatatgatctaacttgaggtggagtgtaaaaatagtaggttatagaatatacttctctctttgcgttcaatgacattgacttacacatatgtataaaggttctttccctaagatctttattttccattttattgttaataatttatcatgacacctatattgcttttacacggtgcaggtttctcaatgccatcaagcaatatctttgcttgtcattattgaagaacagtgccctgtcagcgatggccatttttcaacttcagtgttccattttcatgaacttgttatcaaaattcagatcaggcttgaaaaaagaaattggcatgttctttcccatgcttatccttcgagttctcgagaatgttcttcagcctagttttctgcaaaaaatgaccatccttaatttattggacaaaatatctcaagatcctcagattattattgacatttttgtcaactatgattgtgatgtggatgcttcaaacatatttgaaaggtatcttgcttttgtaatattttgttgctcttataccttggtagtggtcagttttcaagaacaaacatgggctaatattttaaaaagcaaaggtgataaataattttgtttgccaaaaaaaaatgatgaataaccttgttaatgcaaaatcattggattcttttttttcatttattgatagaaaaaaaggatgccttctagggtggtggatagtggttgactaactttaagcctagggagtgtcctggaattgtatgaaatgtagatttagatttggcttttgtggcggaggttttgggtgggtgtggttggtgtcaaattaggattgttgaaatactttattaaggatttggaagattaaaattagttctgttagtaataaagtataaaggaggaggattgtgcacttgtgctaggccctcgacaactaacataaaacatggatcactcacataagattttagctaatgctaagtcgttaattggaaatatcgcactgtatgactcgagtacagtgtcaaatgagctatagtcgttgcattgatgtctgaatgtagtgttaaatgagtaagagtcctcacattttcctggatggatgtgtgtgaagaagctagtttagaggtgcttgattaggtttgctacttggaaattgtaagtctatggaggtggatattggataccatgatttggaggaggattaacattatgtacctacaagagatcaagtgggttagagaaaaaagctaaggagctagataccacaggatttaaactaatacatgggaaaagttagaggaataaatggtaggctattattgtaggcaaggatttgaaagatagcgtggtggatttaaaaagaattggggacaaaatcttatccttaaaattagttgtggcataggagatcatcaatatcattagtgcttatacaccacaagtaggattggaggcacttatggaagaaaagtcttgggaagatatggaggggttggtacaaggcgttccataagaggaaaatattttcttaggcaaggatctaagtggatatgaggaaaagattttcttaggcaaggatctaagtggatatgttggtcgtgaggcaagtcaattttcaggagctcatattggtttgggttttggaggactaaatgaggaaggacaaactatttttgatttctttacgacttatgattttagattatgaaaacttgtttcaagaagctagaggaacatctaatcacttataagagtggaggttcaatgtcactgttgaaataagagaaaacaaagggatagttgagtgaaaactgtgtgtttgaatacatagcggaggcttgtttatttaggtttaatacattgattttacataaatagaggacatgttgtttcctctaaatcaaagattatgtgcctataaatcagtattatttatagagtcacaatattatattctgattttcaacactcatgttaaaataggagaaacaaaggaaaattgattgaaaaccatgtgttagagtacacaaccaatgctctattctatagtggtcattacaataaatactaacaatgagaggatattttgtttcctcaaaaccaaattctagtttcctacaaatcctactttcctactaataataaatgtatattatattctgattttcaacactcgccctcaagctaagcttactaagctctcatcatgttacaagaaaataaattattcccaataaatcaataaaatacacaaaattaagctccacctaagaacaatagtttgaaaagcaactcagggatgttgagaagatcgagataattgctagaaaaaaaaatctttgctagataagctggaaggaatgaccatcagtgagaaaattcgtggcaagcaaagcaaggttccttcttcttgaaaccacatttaaaagcttcaaaccaaaaaggttggagaccctaattatttaaactgaaggcgagatagatgcatctggggcaaagtcgttgggacaagtgcatttgggacataggcgggatcagtgcatctgggacataggcaggatcggtgtatctgggacaaagacaagggccaatacatctaggataaagacaaggccagtgcatttgaatataggaaaaaaaggaatgtcgaggaaacactcatggaataaaccgaaaaggattgggtcttgtgcgccttattttagagagcctagtgttgcaaacgacgtccggaaggtggccagatgcgctgaccttagttgctgttaggtgcgcaaagaacgtacgcgtctgtgcatctttggggatgtgtttggtgcaggcaaacagatctggggaaagtgcaccccgaggatgtactggccgacaaaaaacttgtcgaaaaaatggtcaatgaacagtggctgtcgaaaaagtgacggcgaccggaggttagaaagatcgctcgaaaaaggtgcggcaagtagaagggtccaccagggacccattgtccccggtgaggcattgttttcgtgatacccctgttaggctctggataccattttgaaataggagaaaacaaagggacagttgagtgaaaatcgtgtgtttgaatgtttatgtaggtttgattatacataaacagaggttaaccaagtttggttctgaactttgtatagatctattgatggggctttgcagtatgccactattaccagaccagaaattagattggattttctgttaacaaggtttgcccgttcatgtccaagccttctgagcagcactggatggctgtgaaaagaattctgaggtatctaaaagggactgtgtcttggggattaaaatttcaagctggttctcctaggcttcctttctctcttcatgcctattgtgctgcagattgggcatctgatcctgatgacagaaggtcaacttggagcagctatttttacttgaacctaatctcatttcctggtggtctaagaagcaatcagttgtagctagatcgagcactgaggcagaatacaggagcatggctcttattacagcagaggtaacttggattcagtctctgcttctgaactccaagttgctcataccgctcctctcattctctgtgataataccagcactgtctctcttgctcacaaccctgttcttcattctcgaactaaacatttggagcttgatctgttctttgttgggaagaaggtcatcaccaaacagattgatgttattcatgtgcctgcagcagatcaacttgctgatattctgaccaaggccctctctcctgcttcatttgttccattcagatccaagctcatagtagttgaaagaatttcttccaatccctcgtgagcttgcaggggggtataagagtattacatttactcaaatgtatttttttctttatttcagtaagctgttagtctaactaccattgttagtagttagtttgtgattagaggtcattagtgtgtaaccgctagtgacagctgtatcaactaacttaggttagttgactgttaggttgttagttgttagatcatctatataatctgtaactgtaatcagttatgacttgggttgaataacattagatttctcaatctcattctcttctcttctctcatattcactcaactctattaatttggaatgggacgtctaagaagatttggaagcttgcctgaggagtcctgagtgaattaaaaggttttggaccaagataaagaatgttggtggtggaatgaaagttttcaagactaggtaagaaacaaaagagtttgctttaaaaaccttacatgagtgcaataatgcagaaaattgggcaaggtatcaaaatactagaaatgagataagaaaaactgtgagtaaaacatgatctaaagctttaaaaggcttttgtgcaaggtggtgtcttagaggagtaatataaaactattcatttgtctaaaccttaacagcttaagattttggaattgttagtttgtaacaagttctgataaaaaatttagttatttggagtagatcgtcatgttggaggccataccttgggttttaggatcataattgtttccttgcttctttattgattcgttttcttatatggtgtacttggagcactgtctgcttccaaaagttaaagcttattcaaggtctgcagtacaaatctagtgacagattttttatttacttatgtttgtttgattttgcatcttgttttagtatttaaacacttataattctatcagatatttgcaggattgtcaatggtcttctgaaaaccgctttgggaccacctacagggtcgaccactgctttgtctccagcacaggatattactttccgacatgaatctgtgaaatgcttggtcagcattgttaagtcaatgggagcatggatggaccagcagataaggttaggagatttaggcccagcaaagagccctgaaagcagtaatgcagcagagaatcatctaatactaaatgtagaagaaggaaatgcttctgatcacgagctacattctgatgtaaattctgaattttcggatgctgccacgtttgagcaacgtcgggcatataaaatcgaacttcaggtatgtattacttggctccgaggacgacaaattgttatattgtcacaatgttaacggtaaaatatgtttttggtcccactaaaattttgaaagttcggtttaagtccctctaaatttttttgtccgtatttggtgcctctaattttgaaatgcaccacttttggtcctccaagtgctatctacatttcttttcatctctctgtaaagtgtcatctaaaccacttggaggaccaaaagtggtgcatttcaaaattagaaggaccaaaaacagacaaaaaaatttagagggactaaaaccaaactcttaaaattttagaggaaccaaaatcataatttaccctaatgttaaactatcctcttatactagcataacattgagttctaattgtttgattttacctacccaaaaacctatattgtgtttgtacaattctcttctgtatctctccttctgctcccatgaattgcatttatacataattttgtcttcctgagctgcaaattttcatattctatgctgatgcttttttttttttttttttttttttttctgggttaaatgcagaaagccatatcactttttaatcgaaaacctccaaaaggtattgaatttttgataagcaacaaaaaaattggttgttctccagaacaagtggcactgttcctgaagaacactgctggccttgatgaaaccaagattggtgactatttgggagaaagggaggagttttctctaaaagttatgcatgcttatgtagattcctttaacttcaaagggatggattttggtgaagctattcgattttttcttcagggcttcaggttgcctggtgaggcacaaaaaattgatcgcatcatggagaagtttgctgagcgctactgtaaatgcaaccctagttcttttagcagtgcagatactgcctacgttcttgcttactctgtgataatgcttaatacagatgctcataataatatggtgaaagataaggtttgaccttgctgaatcttttatattatgtcttaggctcaacagttagagtaccagctttgtgacattacttgatgtccaatctaggtgtggtttcgtttctattaggcttaattgatttttttaatagttggtacatcatattttactgatgaaatttgaatatgataattttaatcatagaaaattatcctataaaggcaatttgatttatgcgtatttattctgaatacagctttgaaaatatcaattattttctctttccatttcttttatcttcttatgtaggtggtggtagttatggtaaatcatagctttgtgtcagggaaacacagtgaacaccatgagctataacatcaacatgtaatatcattttgtaaatgatttggatatcatttgattgcttatatttgttctattgttttacaaaattgagattgtaagttcagaatatcttacaatgctgaatataggtttgacctgaatttgtggtgtatattctatgttaatggatttccagatgacaaaggctgattttgttcgaaacaaccgtggaatagatgatggaaaggatttaccagaggaatatctcggggcactttatgaccaaattgttaaaaatgaaattaaaatgaacgctgattcttctgcacctcagaataaacaagctaatagcttcaatagattgctgagattagaaggtatactcaatcttgtgaactggaagcagaatgaggaaaaagcagtgggtgcaaatgggcttctcattcagcacattcaggagcaatttaaaactaattcgcgaaaatcagagtaagccaagacatttctcaatgtttggatttttattttaggcttaaatataatttgggtatcttaaatttaggcctaatttccttttggttacccaaatttaaaagtgtttttttttcattcccctaatttggaaatagcccacttttggtccttatcacggagactaaaatgattgcaaaaaataaccttaagggccaaaagagggctattttcaaagtagggaacaaaaataatcatttttaatttgggaaaccaaaaggacaagaaatttggctcaaatttgaggaaccaaaaaaatatttaagcattatttttttatcattaattttttttggaaatgtatttggttgcaaaactagacctgctaagctctttcttttccacaattttttgtatataggctttgatttggctggctctgctacttgatatctttcaatggattttttttatctaacatttttgagaggattcagaaggtttagttaaaggaattttgaaatgagtaaagattttcctaggagggtgagccctaacacaacagtaaagttgtaccttagtgacttgttggtcatggattcgaatccggaaatagcctctttgcagatgcaagggtaaggctgcgtacaatatccctcccccttaccttcgcatagcgaggagctctgggcaatggggtacgtagttttttgttttttttttttaagattttcctaggagatgatctagttggtcacatgaatgattgtctagagtatagtagagggtaaaacatttctagattttgctttagctaacacttgttttaggtaatgggaagaacatcatatcacatactaaagtaaggtgacatgcttccaaaattgtttttttttccctctaattaggaaatcagatagaaacttttgcatggattgcaaagtcatacttggagaatacttgtttatccagcataggatcttggttatggatatataactcaagaggagagtaaatagaaatggttaagataggatttcaaggataaaatggtagcaattgaagggaaaaaaggagttttgaaagaagtgagggagggtttttggaggacatcggtcaaattatataccatgaggtatgaaaagggtgtaggagcataaaatggctcattgagttgtttaacaagattatgagattggagataatactaaatgagtagagaagtgccttattctctatattttttttttttttttgatcggcaaagataaagtataatattaatattagggcaaaagatacaagtataaaaacaaaaacaagtccatgctagcaaaaaccatagctatggtagcctaatacatagaaggcctgaattagaatatcatagcgaggatggacaaagccccccatacaagtatgataataaccttccctatacacgaaacatatccctagtattagatgaccatacatgaaacggcaagtaaaagcctttatccaaatttttacaccaccaccagcaaaagaagagggcatcatcaaacagcctatggctatcaaaccccccgctttggaaaataatactatttctgtgaccccaaatagcccctatatatgagtatgagaacaagagtgacttctaaaactggtctagttatagaaatattaagctcatgagccatattatgaaactacaagatagggtaattaagcagtcattatagaaaatgaattttgttttatgtcggggaggttacccacgaaagcaaatatacttccttcaaagattaatggaaaaacattggaggaattaatggagagacattagaggaattaaaaggacaattcatcaatttggaaaaaccatatggtggggtacgaagagaggtattgtccttcgcttaggaaatgaaaggagtttgtcctgcttgtagtcgggcaaccaaagatatgtaagatggtttcaaattagagtgtgaacataaggtgaggcgcacaaaggactttcttataactattggactgcaccaagagtgagcgtcaaacctctatctttttaacttggtcttggatgttcttatttcttactgaacatatccatgaggcagatggcataatgcatgcattttgcagatgatatgccctggttggatagttgagagaagaaataaatgagaagcaatagaggaggagacaaactttggaagcttgacttttgtttaagtagaagggaaatgaagtatataaaatgttagtttagctagaggcgcactaattctagtatggacatgaaatttggagactataacataccacaagtcataggttctatagttcaagtttcttggtcatcatacaaatgatggggaaatgtaaaccatagaattcaagtgggatggatgaaatcaaggagtgctttaggtgttatttgtgataggaaagtaccactcaagcttaagggaaaatcttactacataactataagacttgtgatgttgggcaatgaaatccaacaaggagaaaagctcaatattgtagagatgagaatgttacgatgacatacagacaagtttgtgaatgaatgcattctagagaacattggggtagcacctattgttgaaaataaaatatggtagattcttgctttaggtggtttgagcatttgtagagaagacctatataagtcccaatagttagaggtagagaaaaactaagaaaagtcttagggaaaaccgttaagaaagatttagatttaaatagtttgtatattgatatgatatatgagaggattttaccttttgattcatgagagctggccccacccggtgggaaaaggctacaactattgttgtttattgtttatatatttatgattgtgtactggctctgcatcttagatcctttccatatgtgcattttccttttcctttaaggattagctatctgctggattatagattacataagggatgttaatctttcaatgcgtttcatagtttagagtttagacattttatttaccggttattgcagatctgcgtatcatgttgtcacagatgtggctatactgaggtttatggtggaagtttgttgggggcctatgctggctgcattcagtgtaacacttgatcagagtgatgacagggtagctacttctcaatgcttacaaggatttcgacatgctgtgcatgttactgcagtgatgggtctgcagactcaaagggatgcttttgttacatctgttgccaaatttacttatctgcactgtgctggagatatgaaacagaaaaatgttgatgctgtcaaggtaagtgaatcttaatttggatgccattgacattactcaaatcaaatcactcacctttattctccttttgcatttataatgataactgcttattgcacaccatatattaatgtcattttagccatattgtacttatatcaagaaagcagtgatgaatgggttcactttgattttatttgcttaatccttcgcatgaaaatagaatgtgattggtacatttttttgtgtttatcatgtgaatgaaccacttgatttcatgtatatgtcattttagtatcttttaaatcttatttttgtgcaggcaataatatcaattgcgattgaagatggagatcatctgtatgaagcatgggaacacatattaacttgcctctcccgaattgagcatttgcaactgttaggtgagggtgccccaagtgatgcaaccttcttcacttcagctaattttgaaatggaggagaaagcactgaaaacattaagtttctcttcttttaagaaaggaacactccagaatccagccatggtggctgttgtccgtggtagttcatatgacagtacaagtattggggtcaatgcttccgcaatattaacaacagaacagataaataatttcatttcaaacttgaatctactggaccagattggaaactttgaactgaaccatgtgtttgctcatagtcaacggttgaatggagaagcaatagtagcatttgttaaagcactttgtaaagtttccatttcagagttacagtctccaacagacccccgtgtatttggcctcactaaaatagtagaaattgcgtaagtttctttgtcctttttatgatagatgttttctttgtgcaattcattcagatttcttaaataataattttcttgacatatggagcttgcacaatgaatataaaccatgcaatttacactcagacattgcccattttgttttatattccttatttgtacttttcctagtgtgttttggtatgaatatgaaatatcctagtatatgaaattatgaatacatgaccccagcaattttttctcttcctcatattgaatatggtgttgacattgtcatatgttttaggcatttagcccaatgttgtggccaagcacgaaataaagtaatgccttgccctgctacataaaacctattgcttttgatatttatcttaagaaagtggctgttatagatggaaaaagtaagaattttaagataagttcaactattgataagctcaactattatcataactcataaggaattatatggatgtaacttggatgccaagtaacctggcagattgaaggtttaggtttttggtatgttcaatctcctcggtcccgtgtttgagtgttgtgatcttcttatgctgttatattttaaatcacaaaatggtcattcaaaagaaaggaatttcttgtgactatgagctacttggcaggcaaagctcttaaggactagcaaggtagggtgttttaggactttggcagatacatatggaacaagcttggcacatatgatatatagacaccggctggaggggagtgttagaatatcttggatatttatgagatatgttaagatatcatgtatgttggaaagccaccttagttggggtcacccctagcccaccttagttgtggtggttggtagccatgggcaaagaggggtgtgttgaagttccatactggctagagatagtgttgagatatagtatataagtagggagcaatcctcaccttacaagccggttttgtagggttgagttaggcccataatccactttctaagaatgtatctattatagaactggtaaggaatcaatttagataaaatcatcttttaattttgaaaaacatatactacatcttgagaatggttttatacatccaacatttcccaagaatcatttgaggttaaagcacaaaaaatgcacaagccaatttttccttttgctgaaattcaactttatttataaatgggagcttacaaggattgaactcctaactgattggtcctggaagctctaatatcatgtcaaggaacaactgtccaaaaagcttaaaatgttacatggtggatcaagaatggttttatgtctctaactctaacatatttatgttaattgttatatcttttagaatgagggaaatgttacttgcctgaaaggggatcctttgttgattttattagaccttaagaaagggattgtgattttctcttggtcatgttctttgtagctagtaattggtgattccaagttattctcttctcatgcacatttatgattaaaattctaatgatcattcaatctacttaagactagaacatggttgcatttgcaggcattataatatgaaccgcatcagattagtatggtctcgcatatggaatgttctctcagatttctttgtgtcggttggattgtcagaaaacttgtcagttgcaatctttgcaatggactcgctgcgacaacttgcaatgaaatttttggagcgtgaggagctggctaattataacttccagaatgaatttctgagaccatttgtgattgttatgcagaaaagcaacaccacagaaattagagaattaatagttcgttgtatttcacagatggtccttagccgtgtcagtaatgtgaaatctggctggaaaagtgtttttatggtaatgttgaagttggcttgatccccccccccccccctccatccctccctccctccttgagaccatttgataaacaacaaaaattgaaactgtcaaatgttgcccaattgtttttattgaagaaagcaaaacaaattgagaaggcacatttgtgattgtttactattcttttcaagaaaaaattacattttattacttgcatacacacatttgttggcaatttagatagtctaaacaatctttcaggaatgaatattcatggtcaaattttaatacctctaaaacggcttgttaaaaaggaaataaatacaaataaaaagaaaagaaaagggacatcaaggatacatatctagtcaaactattgatggttttcaacaatctaaatgcaatacacaagtttagtgtaccagcaaattgttaatataatgacatttaccaccatgttcagctatgggcttcattaatgtccccgcttccttcctaagcaagaagaaaatgcacatctcatttgttagcatttgtgaattgagacaatggaacaatcttgacttataatgcagtgtttttgactcaggtttttacagctgctgcagctgatgagcggaagaatattgtattactagcatttgagaccatggagaaaatagtgcgtgaattttttccttatattactgagacagagacaatgaccttcaccgattgtgtccgatgccttttgacatttaccaatagccgattcaacagtgacgttagcctcaatgcaattgcgtttcttcgtttctgtgcattcagacttgctgatggaggacttgtttgcaataagaagagcagtgttgatggcccatcaattgttgtagcaaatggtatttcagatttacaatctcatactgataacggtgatcatgtctccttttggaatcctttgctatcaggtaatatgcatttagatgatatgccctaagatatttggtacagtggccaacgtaccataacggtggaccaaaaaacttattcttgtgaatcttgtccaataaatgtatgtattctgtttaattgattgattgcataaatctcaaatgtctattgctcacattcctgttgaagctgccttttatatacagtatgttaagctttgtattaagtttttgcgttaaattcttgagcaatgattgttgcattttgtcaacagatttgcttgcacttctcttgttagatgtagcaaataagtggtacctttagctcctagttagtgtcaaaaaagcaaacgtaatagtgatttaaccacattttgtgcagcagtgagataacataaattccataactcttgtctgttctttctgctttaagttaatatttttatattttcattgcagggttatcaaaactaacttctgatccaagatcagctatcagaaagagttctttggaggtgctttttaacattttgaaggatcatggtcatctattctcccacacattttggaatagcattttctgttctgttattttccctgtatataactcggtatctggaaatagagagatgaatctacaaaaggcccattgttccccttcttcagtatctgtgcatactgaaggaagcacatgggattctgagacttattcagtagcagcagaatgtttaatagatttatttgtcaccttctttgatgtggtgaggtctcagctacctggcttggtgtcagtactgacagggttcattagaagtcctgttcagggtccagctagtactggagttgctggattagtgcgtctcacaggtgaccttggtaacaggctttcagcagaagaatggaaagagatttttctatgtttgaaagatgcagctatgtcaacagtgccaggattcatgaaggtcttgagaaccatgaataatattgaggtgcctcacatttcacattcttctgctgacttagaaagttcttctgatcatgacttgaacaatgatgaatttgatgatgacaatctgcaaacggccacatatgttgtgtcaagaacgaagaaccatattgctatgcagctacttattgtacaggtttatttcttgctcgttttgtatgtgcataagttaacaattaaaacataagcactaaatttcctagtattcaatttatatgcatccactgaatttaaatcgtaatccactgattttgttttattagttttttcatgaaaacagatttaaagacatgtgtagtgcagcttgatataaatttcacctctgaatgagttcatcttgatgatatctttctgtgttctattggcaggttacaactgatctgtacaaaaagcaccagcaatccttatctgcagccagcatcaaagtccttattgaattatattcatctattgctttacatgctcgtgagatgaacagagagtcaattctactgaggaagttgcagaaagcttgctctgtcctggaaatatctggccctcccatggttcattttgaaaatgagtccttccagaatcacctcaactttctacaaaatatacatcttcatgataattttgtgcatgatgagatagagctagaacaagagttagttgctgtgtgtgaaaccgtattggacatatacctaaattgtgctggttccatttccacttttcacaagtctgataccatgccagcgcctcatggaaaactccctctgagctcagcaaagaaggaagagatagctgctaggacatctttagtcatctcagcattgcaaggattggctggtctgaaaaaggattcattcaggaggtatattccacggttctttcacttactggtagatctcgtgaggagtgaacacacctctggagaagttcaacatgccctgagtaatatgttccgttcatctgttggccaaattataatggactgagttttagttttggcatactttgtttttggacgttgctgaatatcaatcagcattttccttataagctaaagaacgagccattacatggtcatatcttgatttactcaccattgttgtgtagtgttactcttggttttttgtgattgtatgtgccattaatgtaaatgataaatttatttcaagcagaatatggaagtaccacagatagatagcgaagagacttaggcagccgctggcagtctacaacttggcctgacttgttccttttcaacaatggagattgagtcatagtggaaggagatagtttctcttaaggaaccaaaaaagtagtcttgttccttttcagatgatgtttaaggttgtgacataagaattaagatatataattaatattctttttttaagattgttacatgatttcttattatattatttatttatcttattgattaattttctacaatttattttttattgatctgtttaattccatgataaatgggtaagataattttaaaatatagataaatataaggatataattaataaaagagtaaggaaagttttgaacttttaaaatgagataaaaatgaacaaaaaaaaaattcttaataaaattgacacttgaaaaagggtagtatttgtcaaaaaggataatatttaagtaatttaaaattcttttaaattaaatagagtctattcgaatatattattgttattattgttatttgcttaactgttaccttcaggcaatgattaaaaactcaatttttttatatatatatatttttatttagaagtgtatctcttggtaccaaaaggcttccaagtttgttatcctaaggaaacttacctttctttttcttgtgtattgggcgaatggttttgagtataaacatgtatatttggtcgttttaatgatttaaaaattcctgaactaatatattgttggtaatgactgttgtatttatgtgcattatggtgatttaaaatgtttttttttttttttttttacgttggtgatttaaaatgttttaggggtaaaaatcactaaaaattcttacataatgaattttatttgcgttaatactttgatgactcttatactaatcgcgagtgattgagtttataacttttaaaattttaataaaaaattgtggcaattttagtgaatatcatttttaaattagttattttaaaatttaaaatcctacccatgttagtatcttaatgatcaaaatggattcattcataaacataaaggaggaaagcgtgatcgatcaaaattcttcattcaactagtcacattcttatttcattttacaattataatttgtgtaatttttttatagtcacaggtattaaattcttttttcgatttcaaagtattaaaaaaaatcaattattataataataagtaatatcaaatatttaaaattatgtgaataaagaataaaaaatagtaaaatacataactatcaagcaaccgtaagtataaataaaaaactttaaatacaattgtgtttcccatttttaaaaatattttgactccgttgatacaattttaaagaggagggaatctagcatttaaattccattatcacttatcaatatttgaatgatatggttttttatataaaaaaataaaattggttaaatatctttatgttttgttttgagaggagagcaataagtttatggtgagagagaaaaatatcggcatttcctcattctgcagtttggttggagttgtataatctctttgttgtccggcgcggacttcttactgtcactcgacctcgacctcgacctcgacgacggtcagttgttttcttttccatatctcgtggctttgctttcgtttcgtagtagtgtatatcctgaatcctgatcgcagaaatagtattagtaattgggatataaataaattaattagtgatggataacgaggtggaggtgctagaatttgatattgggctgggaggaggcgagggagaatatgacgatgacgacggaggaggaattgatgaggaggaattggctgtagccactggaggtggggaaatatatcttcctgagggggacctcttagatcttgaaccttgcgagggcatggaattcgagtctgaagaggctgccaaggccttctacaattcctatgcccgtcgtgttgggtttagtactcgcgtcagctcatcccgtcgttccaggcgcgatggagctattatacagaggcaatttgtttgcgcaaaggagggtttccgcaacttgaatgagaaacgcacaaaggatagagagatcaagcgcccacgtacaattacccgagtcggttgtaaagcctctctttctgtcaaaatgcaagactctggcaagtggatcgtctctggctttgttagagaacataatcacgaactcgttccaccagaccaggtgcattgccttcgctctcacaggcaaatttcaggatctgccaagacgcttatcgatactttacaggctgctgggatgggccctcgtagaattatgtctgcacttattaaagagtatggtgggattagcaaagtcggcttcacagaggtggactgtaggaattacatgaggaataataggctgagaagtttagaaggtgacattcaacttgttcttgattatttgagacagatgcatgccgaaaaccctaatttcttctatgctgtgcaaggagatgaggatcagtccatgaccaatgttttctgggctgatcccaaggctaggatgaattatacattttttggtgatactgtaacctttgacaccacataccgatctaataggtatcggttaccatttgctccctttactggtgtaaaccatcatgggcaacctgttctctttggttgtgctttcctaattaacgaatctgaagcatcatttgtgtggcttttcaagacatggcttatggccatgtctggacatccgccagtgtcaataacaactgatcatgattctgtaattcggtcagccataatacaagtcttccccgagacccgccaccgtttctgcaagtggcacatctttaaaaaatgccaggagaagttatctcatattttcctccaatatccaaattttgaagcagaatttcacaaatgtgttaacttgactgagtcgactgaggaatttgagtcttgctggtcaacacttgtagataaatatgatctcagggaccatgaatggcttcaagcaatatattcttcttgtaggcagtgggtacctgtatatttgcgagacacattctttgcagaaatgtccatcactcagcgaagtgatagcatgaactcttactttgatgggtatataaatgcttcaaccaatttaagtcagttctttaagctctatgagaaagcacttgaaagtcgcaatgagaaagaagtgagagcggattatgacacaatgaatactttgccggtattgagaaccccatctccaatggagaagcaagcatctgaactttacacgagaaaaattttcatgaggttccaggaggagttagttgggacacttacattaatggcatccaaagctgatgatgatggggaggtcattacatatcatgtagctaaatttggagaggaccataaagggtattgtgttaaattcaatgttctggagatgaaagcgacttgcagttgccaaatgtttgagttttcaggccttctttgtaggcacgttttggcagtctttagagttaccaatgtgcttactctcccatctcattatatactgaaacgttggacaagaaatgccaaaagcaatgtaatattagaagaacatgcttgtgatatatatacttactatttggaatctcatacagttagatataacaccctccggcatgaggcttttaaatttgttgatgaaggcgcgcggtctgttgaaacttatgatgttgcaatggatgctttacaagaagctgcaaaaagagtttctcagggaatgcaaaatgagggaaaaattcctatcagtaatggaaaggtaaggagtcatgtgctgaacgaggaaattcatgctaattacacaagtgggtgccaggaagaaagcttgagccagcatatgtctaaggtctgatttccatttgaaaaatgtttttaatctcttttatgatatctgtttgagtgcatttactctttcatccaccgttatatgaaaccaatcccgaaccttcacctaatagcttaaggcattatgatataaaccttgacggcttcacctaaaaccaatcttgaaatcgtaccagagctgctatgaccaagtagttaggagtttgatccctgccactttcattcttataaataaagtttaattctgtcacaagatagagaaaacctgtgcaatggccttgtctcaagccctaaggaattggtgtgagggggttagagatatataactagtcttgaaccttcatctaaccgcataagattttgagaaagttgattgttggcacaccctttttagctctcaaggtaaggctagttactttttactcttaatccttcaataacctttagttattatgagtgcttttgtagatttactgtatttaagtccagatacatacatacatatatatatatatatatatatatatatatatataatcatttgtggtattttaaataaagctctgtttccattccttgattcaaatatgaattacaggtcaaagtaataatgaagactgtacactaatttaggagtctaaattggaaacagctaaacctaacaatgaaataatctgaacagattagaatcaggagggattttatatacaaatattaatgatgttgaaagatatatagaaacttcgttactgtttcattttcttaaatttagggggatttattattcttcccctagatgtactttctcttatttctttcaaatattatattctttctgaagaaagaaaacatttattgtgtaacagattttatatcattggttttaaatatataatcattcatgcttaagtatgcttttgtttattttagtttcattgctttatgtcctgcaggatgatttggataagaatattagaaaacttatgaatgagcttgagtgtgcaaatcggaagtgtgaaatttatcgctccaacctgctttcagttttgaaagctgttgaggatcacaagttagagttgtcagttaaggtggaaaacatcaagataagcatgaaagatggcatctaaagactatggagaattaaaattgaaacagataggaaaacaaattctattttggcaatccagtcgcgcatcaataatgatcccatgacaacccgccgccccacaattgtcttgtagacctcttattatgtataaagttggtttgcagtgtattatttttttgttcagtactgtatttattatattgatgtcaacttttatagtccaagtttgctttaagaaaataataatgtagcacttatacgtcatcgtattaatatttttctgagtttaataattgcttacatagttttttcttttttaaggaattgcttacataatttttaacccgcagaaaatgaactatttgatttgcataaagtccaagtgtttcaacaactatttacaattttttaataccatatgaagaaaatattaaatgaaaaataaacatatttaatgttttagaaattaaaatgcatttaatacttttttttccctagtaagaagattaatagaaagattttgcaagagaatttagaatattcttttccattaatcatcatagattgggtgtatttagtcaataaaaattgataagaatgaatttataactcataaagacatagattcaattttttttgtccatgtaagaattttgttgataaataatatgtaagtatctctatcaacgttgactgaatcttgaggtttagtctgcttttgactttgatgaatttctgatattcaaattacaaaaatcaagtttaaattcaaatttataatcacatagccaattagatggtggtttccatgtttagtgagtgtcctaagagaaattgagaaattgcctcaaatattcatttaccaaaatcaataacattgtaggctcaatattctacaatgtaccttttcttttatactattgtggtatggtatcatggttgtaatttcttataaaaactctactcatatcttgagagtatttttaattgtcattcttcaatgaggatgtgtttacctgcttttcttactatattttttttttgttaaaaaaactatcaataattactatcacaatataaattattaatcataaatctaaaatatattttaaatgtttcaaaatatttatttattataaattttaattataatataaattatataattaaaagtatttatttattataaattttaattatatccaaaaagcatttattttttgtaatacacatgataaaatactagtgaggtgtaactttaaccgagagggtatttggtaaaggatatttttttatacccaaaatcataattcctaaaatcaagaatcctaagataataattcaattattttatatgatttaaattttttacccaatgtagatcaattgatgaggttgttaaatttaaaaagttttactctgatcttttttaatgtcttgcttagaccaaattgatccttgtgatagtttttggtactaatgatgttaaatttgattgatgtcatattttttatttttgtcatgtgtgataaactaacatatgaacctctattgtataatagagaaactttaaaggattaatgtgatttttttaaaacctgaagcaccgagattctatttaaaaaagaaaaaaagaaaaacaaatgttgtcataaagttttcataatttttatttttatttcttatgtaaattttttgaattttagtattacttgttcagtctaaatcatttacatgtgtaaaaaaattatacagatactaacatttatttcctcatcaggaatagacacacgtgcttttttaaaaatataagtacaaaaaacattaaatttttatatggagtaaaatcaaattttgacctagggataaaaatatattttatctatttcaaaaatagtttttttacaactctattaaaatatttcttgaaatgttgcaacaataatattctgaaatgatttgttaattaatgtcctaactatttttaaataattaaaaaaataaaaaagttttttagaagtataatatttaatgtattaaaaaattaagacaatgtattaataaaaaaacattttaaaaattataatacgtatactaagtacatttattagtatttttattcttaaatttaattatttatcacataagaaaatattttaaaaaattatttattagattcctacataccttatgagaacaattttatgataaacatgaataaaaaaatattcctaagaaacaatgataaaaaaggatatgcgcttttttaagttgtctctcatcagatgacaaattattatatataataatttttttacttcgataataatcaccctaaaaatcacaccaaaatttatttttaattgattgatcatataaaatcttacactgaccgtgtatattcatcaaactcaaacgatatttcctgtaaatgttttttgtaatatatgtcaaacaatgagaaattaatatttctaacttcgtatgcctggacaacttgttgcacttcctaattccaactattttttcttctattactacactactcggaaaagatacacttgaatgaaatgctactagatttcggttgaaaagtcacagaattttattttttttatattgaaaattgcaaagtcatagtggtggtactataatattgcagtaccaaattgatccctgcaaattaaatatcggacaatacatatggctatatcaaattacaagggttctctcttgggggaactacatttactttcatcgaacataactatacacaagaactccaccgaacctttttttacgtacaaccacggaaccaacgacgtgacaagatttaacttggcgtgttaaaggcagatattatagtgccaagaaagagtcttcagcctcctaacggtgattaagtcagtgtggaatattagctgagggactgtctggtggccaaagcactgtacttaacaaaaataaataattacgtaaaggcataacatacatacaaacatggaagagaattaagtaatatcctttttaaccccaaaatgattgaaatgaagaatgattcctattcctattcctattccgtcctttaagtttcatccctggccatcctagattttccttttagatccactcattttagtatatctgattttttattattaaggaatttgcatctctgcattccacatctgaattcgtgattttccagtctgcatgccacattttaggactattctgtctgtcgtacatttgcttaacattcaatgtcaatgccatgaagcaaagttcagcaaatgcaatgaaatttacccttcaacctcccaagatattcaaaattcaaatcacaaattccaaatgcactcctaatcatcaaacctatgaggaaaattgatagaataggcctagagagtccaaaataggtgacttaaatattaaatgattcaaatattatctttttaatattattcagttttattttaaattctctaaaattagatgaggatacttgtgcggttgttattgacaaccattttaggttataaattttatccctcatttggctgagtatcaatgaagaaatatttgagtctttattttattagctctgtaactttctatagttttaatggtagattgataggagtagagtagtagctcttttgagcctataaaaaatctagttgaatcttcctgtcttgtggcaactgacatcttggtaagcatctaactattctacatattccactgacacttcatgtttaaacaaaaccctgatataaataacaaggtgtatatgtccatgcgtattagcatattatctttcctgtactgttttaattcaatcctttcaaaataagaaataaatatgaattaaaatacaaattgtatatttgaaaaaagatttgtgctcctggaagacaaaacaatttattaaaaagggatacaaataagtcattggaaaaaaaggaataaaacctgcatgttagactgatactctctgggtctataatgccaactggatatgttctttcatagatattcctcacaacaggaacatgattgaatctgcgctccttcataatcatttgagcataacgaagttccatatcaggtgtagctgtccatggcacgctgcatatttctccatttaaaaggcaaaattcagaaactaaaagctcctgtaagaagaagaaccaaataatcagatttgtgaagcaacaacaaagtagtttagttcagcagttgataccaaatatctacaaatgaaacacaattaatagaaaaggggggagggggggcttacaatatcttcaaccaattcatctacaaggcactttttaaactcggacttgtgcatcccaggttacattacaaatatagagaacctacatttgtgtaatgactgctggttttcaaacaatgattggttaaatgtgttgtatcaccgattatgtattatgataagtgtctgccaactccaattcatggtataaaattgcaagctcataattaagatacaatttcaatagcatacccatcacctattatcttaggatttatagattcacatccaattaatactaaacttggattcttgtaccttatgttttgtgcttcttgcttttgcaaatttaccatactcttgaatgtctctaagcgtcaaaaaaccgattaaagtatcatcggtatcaacaattacggcacaagattgtttctctgcaagcatgagatctattacttctataagtggtgtgcacattgaaaccgtcacatatcttgtcttcatggcttccgaaacaaatgttctccttacaaaatatgttgtttcaacattatcatcctctacacaaagtgaactttccacttgacacaaattactcaaatatgacacatcttcagcaaaggtattaccagcagatgactcaattgaactacgagaagatatttctgaaagtaaagcagaatttgagttttctaactccattttttttgcccctctgtcatctcctctttttgtctgtacagatgaaatccatgacgacaagcctacagctccaagaagtggtagaacaatccgatagtcctgtgtcaattcaaacagaagcaaaactgcagtaagtggtacttgacaaactcctgcaagagtcgctgccatcccaacctgcaaaaggaacttcaatatggtcatctatgcactaagcgtagttcacaaatttatgcattatcaacatgagacatttgtaggcagtgaataaattcttcagtatctgaaaggaatcccaagaaggctgctctggtctgttaaaggagagagagactcactatggagttatacactaatgcaaggtccattatagatagaaggtccacttcaagatattgtatgttcttgggtggaaacttggctacatggagaagcaagaagcaaagcgtaattgcaaggtcaagctcatttttgggctatagcagttctcatcccttcaattatccaaaagcatatcttcattgtctcataaaaggaatcattttcttacactatacagtgcttcagaatttcaaattgctagttattgctttcattttgttttagagtttgagcttaggacaataggacctaactaaacgccacaaaaccaacttgtaaggagaagactgcccaagacttataaggactacattgattatatctttagtcgatgtgggatctcatcacacctcgtcaagcctaggactagacatttggagcatagataatgcaggtggcccaataataccacctcctcatgcctaggaatagacatctagatcatacacagatacaagaagcccagtaacagatctaggatagactctgatattatcttaagaattttggctcaagacttctaatcaaccccacaaaaccagcttctacagggaggattgtccaaagcttttaaggaatatattgggcatatctctagtcaatgtgagatctcaacaacgttaataggtgacagttctgaaaccaacaaactgaaaacatatcattatataccatgactattgataattggaaatgcaatggataatgctatttgtaagcatgaattgaagcttatgtaaattcattccagctacttgaacacaaaataagttttatgatttcaccaaagagtaaatgctttgttcggaaatttagaggctgtatggtttgttttctattacaccatttcctcacaaaatcttgaaaataggaaaccaaatgaaaagaagctagcgtctttgaaattgttagtgaaaacatatcaagtgaaaataaaacagagcataaaccaaacacccttgaaatgtataaaaaaaaaaaaaaaaaaaaaaaaaagcaacgaaaattagcaaaagaaaaaaaaaagattcaaaaattactttcctttcacttgattggatgtttacaaagtaacattattgaaacacaagcaatggacctatcctccactctcaaggaatcgaaaaattgttagaggtagactacttatcttttatttactgaaaaaactcccaagcaagagaaatacctttcatttctcttccttctttcattttactttcagcaaaaagtaatatgtattataataataaggtaagtacaagtggtactattatatttacactgttgccctactatgtgtagacctatggagccctaatacaagctgtattgcaagaattaggcatccatagatctggatttgtctagataccccttcacaaaagtaacctatagagcaatccccccctgaatacaaaacccgacccttatattcctagcccaagaatgaaaaggagccatatccagcaagaaaaaagggcatcatccatcagcttaatacattgataacctaaaatgccaacttatgcatttgacatttattgtacccatggcatccttcttttaatcagatatttaacaaaagaattttacttacagagaatagattacaggacagatgtccaagagattctcctaagataacatgcaagaactgaagagacaggactttaacatcaaactagttagcaaaccttatggtccctatctagaatcaaaattctgaaatattaaaaactcatattaggtacacacaggaaagagagttcctcttggaaatggctctttgtagacccatggtagtcatcttggaaagatataattgatcccccatgtcaaagagaagaaaaactgacgatgccaatcataaaatacgaaatggtaaaaaccatataatagccaaaatggaaagaatagtaccaggccataagcttgtggtgatgccacttccaacacagagaggttaatcgtgggattagactcagcaacagccaaactaattaattttccataagccatcccagttgcaccaccaataaagagagacggggcataataccctcccactaatccagaagccctgcacagagaagttgcaactatcttgacagctattagctgaagcaataggtcagtggaaaggcctttaacaaatggccgagattctaataaaatgtcaatattctcaaaaccccagtagaggatttcaggatatatcaatgctatcaacccaactgataagcctcccaatacagggaatgaagatcgtggaatgccagtggccttgtgcagattgtcaacaatagtcaacatatatgatgtacatctagatagggccaatgacaccagaccacataaaatacccagcaatagatacagcgggagctctgaaatcaagttgaatactctcactttaaaacttacccatcagattgagaatagcaaaatatgttcagaaagaattcagcttttgttttcttgaatttcaaaatcagcagttcaatacaatatattacccaccagtttctgtttcatagagactaaaaaacaatagagaatatacaatatcaaacctgaaattctgtaagcagtattttacaaatgaaatcatattaaactacaacagaagttttttttttttttcatttgaagtttaaaatcttgcaaaagtatgataatgccattaatttattgctctacttctgaagttctgatggtcaaaccaggagattcatgaggagtgatgctgtgcacctgtgactcttgtagatttagaagcagtcaaagattttgaatgccagcagtacagacaattcgcaaatcaattagaacaaaaacagcagcagttgccgcagcaatgttggtaataaaggaaagttttcagcagtcaaaaaggagtaattgtgaaaaagcattagtattggcttgcctagcagaagaattgtcaataatgatgaccatagtgacaagatgagcatagtcagagaccacgttgatgatgaaccgttatgtattgaagcagaaagatataagtaaaatggccatactatggaatttatgcccaagtagttcaatgatccaatatgacaccctaaaggtataatttacttgcatttggctgcttaaatcttcattgtaggagaaaagggactagcttactagaggcttccatgtattattatacttgactagatttaaccaagtttgtaaggaaatgtccaggtacagccattctgagttgtatttttgcaagataggcacagtcagttagtcaagtgcgttgttaaaccaattcagtacacatattaacacatacataaatggaaacacttcatgtattgatatactttgctgaaatttgacagggaagaaaggaacaaagcaatgaacaagagcaagagaatgaagcggtcaagtcataaataatctcaaagaaaaatgtgttgatgacttaccaccaggggaccggaagtcatactcgggaactttaaaggcaggttgagagccaaggccaatctcagaaactacagaagctatgacagcactaagtatcaccatggaagtattatttgtaagtggtaaagatgcatctgcagatgatggccacaagacagactcgacagcgaaaaaacaaccagcgaccgcagcattgaaacctgataagaaatataaattagagaagaaaataatcggatcccaggaaagtgataaaagtaacgtgtaagtgtagataccggcagagaggccagcagcagatccagcagcgagaagggagagcattctgccggaactatttccattgtcaaagaaaggacggaggcctttggcgatggaagtaccaatatcgacactgggaccctctggacccaaggaattgccggtgcctagagtaacagaagctgccatggcctttaagaaagggcgggaagcagacttgaggttggcagatggagtttggaggaaaggatcttcttggacagcggaatcaaaacgttgacgaaggaggtttagcagagacacaataacgcctccaaaagtcggaactagtactacacgtgcccatgttgtctgaataggcgcttctctcagccatgaggcgcctcgattgggaatcccatcccagaacaaatcacgaatttcatgaaccttattacatgtcatgaagttacatataagtatattatgataatagagagtatttatctatctatgtatagcataataataacaacttacagcataattgaagagcacgacagcgacgccggtgaggagaccgaccaagcatgaagatattattccggaatcgccaatccttctggtgaggagcttccattctaactctagtagttgtacttcttcctcttcctcttcctcttcctttccagccccagcttctttattatcaggcacacaacacggacgcctcgccctaattcgacacagatgagtctcgtgtgcagaagcagaaggaaacaacgaccacgaccacgaccaccaccttgttagtgttagttcttcagatttagaagcaaggattcgaactcgatcatggtgccagctggggtgaactcctactcctgctatgcatcctaagccaaccatttctcacgatattccaacttcttcccacgccacactaactcatttttccccctctaattgaaaataacttttaaaagctggaacggataaacaatagatgaattttttttgaagaatgcttacttattaaataataataatttcttaattttttcaaaatccaaattttacacttaactttttttttatcatattattcattatatctattacttgttttttctctattacttctctcttttttcacaaacaaacaaaaaattattcgatctaaccaaattaaaattgaacttatgcatatataaataattgttttttatatttataatatcactcatttacatattttttccttctatatttataatattatcacataacttgtttatgagatatatatttaattaaagataatttttgtaactaattaagtaaatttattgataagttatctagttgtgtaaatttatttttgtacatatttaaagagttatactactattaattatatattgacttataaacaagatattataatttttaatgttttttatgtttaatatgtattttattatttatttaaggcttaattaccaatttgttcactaagttatttaaatgattaagtttggtttttaaacttgcaactgctctaatcagattctctaatttttaaaaatacttagaatcgagtcatttccatcaaattaaaactaataccattaagatgagatttctagaggtttgatttaccaataaaagacgtcactatctttaattttattttaaaaataaaatatttttcccttttctgaaatcaaatctgaaacctacaaatttggaattgaatttgaaactcacaatacacaagcacaatcacaattattgtattcggaggttagagaattcgttggcggtggcatgacgagggagtctatgatggtgagatgtgtcatcgatggaattgatgcggagggaacaaccaaaggaggtggtgttgcacaatccgtcctgcacaacatacatgtgtgcgtagtttccaacgaacaacattgatgtacgcagaaagaataagcgagacagacgtgacgatagagaatgtggcgagggcattgaaggaccaccgcaccatcctcccttcagatttgaacaaaaacgcgacacttttccttcagatctgtacaaaacctcaacagtcccttcagatctaaacaaaaaccgcaccaccctccctttacatctgaacaaaaaacacatcacactctcttcgtatctgaacaaaaaatgtgcaaccttcccttggccactgtataactacaacaacccatgttgttaccatggatgaggactacgtgaacgacaatggtgttgaacgtctaacaacattagtttaattggccagaaagaatctaattgatgcatttttaaaataattttgaaattaaattaataattatttaatatgttatttaatacaatctcatccacaaatactcctaagtataacattaagagtattaacaacacattctttctaactttctaagataaataattattaattaatttttattaaaattataaaatcataaaaaatgctcattaaataacaaatgactcttaaaaaaaattatttccaaaaatttagtaaataattgagcgtgtattcaaaagaatatatcaaaaaggatattactaacatttctggtatcttaaaaaaaaaacacttctcgtataatatttctgacgcggcaaagtactcacttcataaaaagcattgtcctcggccatcactttgaaatcagttcacatgcacaagaacctcccaaatttgctaaggttcgatcaacaaagtcacatcgctcaaactataggttttccccacttttttagaactcacaaaatttaggatggggcgagggaaggctattgaattgctaggtcagggcaacgtccttaactccaacaagagcttctagtggaatttacatctcacgcatcaagaagaataatgtagacaatcgaacgtaagcctggttctatccatgttgaatgttgagatacacacactattacagtgaactaatatgtattcgtttgctcaaggctaaacaacaatgaataaaaaaaatccagtataggaaaaacagaagacagaagtgatagttatctttgtatcttcccagcagagtgcagataaattgcaacagagacaacactgtaaacataatttaacaaacttttattcaagagaaaataaaatgggtataaagcaatttacgtgagactacaaaatgaagcattaaaagctattgccccgaggcatgcacatcaaaatgaagcatttcaaaatttaacacaagttatcattaagagccaaagccataaaagtactaaaaaaatcaacattttaatttcagttgctggtatagtatgatgtattcatgtatgtgcaatacttgggtcatggaaaagaaaaacacaacataggacacggcaagcacaatcatgatataataagcagcaacttacactgtgcccaggaagaaggcgagggagagatggaagccaaaaaggaacacagaaacaactgctgtaagaagcatcgcaactgaagtagaatacacctgtgtcaattggaaagttaatcataaatttgaattccacttcaaaggttttttgcttgagctagtaaggctgtaagggtgccataacgtttgaataaaccaagaaaaacagaagcacacatatagatcacatttgatgaaagcattcatcaatcatcataatgcagctctacttctaaatactaggcacagaataaaacttgtgtgcagttcattaagcgagctcagattctacaatcaatatatgataatgtgttcagagattgtaaatcacattctatatactcaaacacaggatttcctcatgcaattcagaaatcgtttctcccttttcaagtatgatgataagaaaagaaataaaataatatcggacagagtaaagtgatgatagaaattttaatatatttttcatttaactgtagaacctgagagcaaacatctaatgagcatcacttaagttttgtccgtaaagaatagtgggggtctacagcaaagtaacaatatcacacactctagccaacaagagatacccgcaagggcacataactctaaccccacaattttttgcataatttcatatttatattcagtatgtgtgaccatgagacatacaacaaaaagtgtatcatatgaacaaaccaataataaaaagttattgtagatgtagcatgtttaatcatatgaataattccaattataaaaaaaaaaacccataatcttaatttaaactcatgaaagtttcaaattctattaatacaactaaatggtagaaatatcataacacagtcataaacccaagtcttactttcacaatgttgtcagcatatttcattaccattgatacagcaattccactgcaaaaagaaacaaccacgtaaacacattacatcaacaagaaagtcaaaactgtaaaacaataaaataatgaaaacttctactagtatttgcttgaaaagagatattcacattttttgtgtagtgaaagagatagaaacagacacatagaaagagagaggacttgatgagttaaaggaaaatagcttaaaaatgacaacagttgaatatggaaatcaccaaagataaagttgaaataaagcctgtttcatgcaattggcacatgaaccttcccgagatttgcttattcacagtttcatcaaccatcaaaagttgtttcatctttttgtcgctcatactccacagtccacatctcaagtaacctttcatttcaggaagaaacagaagaagcatccaaacaaaggaggggaaatggttgattaatagaacaccaaaaacagaagccagtgcacgactcttatccatttcaaaagaactgagcctaagctcatacaaggatgcaaccagagaatggactgctgggagaaagctattttctgtcaacaaaaaaaaaaaaaaaaaaaatttacgccagcatgccttgcagccactccttgtattcccactctactcccaactgatatgtcaaatcagcataacaaattcccctccctgtcttgaatttggactaaagcctaagaattgtccaagcctgtataagctctacttttgccatatctatagtcgatgtgggatctcaatagactggatcccaacaactagtggtggagggagggggtgacccacaagggccatggtcacccccaagcttttaaagtgtatttatattgttaaacaaaaatctttgtccctcctagctatctaccataaaaggaaaaaaaattatctatcctgttagttgttctatttcttctcagacacgctaccctactctacctccacttggttttcttctttgagaatttggattttcctcagttcctcccgttcttcttcactcttgatcaaatcttgattcctctttatttcccataatttaatcatttgttagaatcatattgagtttcttttcattgaagtgaataacatccaaaatgaacaccatacttctatccttttaagttttaaggaaagattacaagaagacaagtaaaacccaaaatgaataaaatcaagaaacatattgtgaacccacatacaaattgtatcagttggtttaaaaactttaacaaagtagagaaagagggaaacaacggtaaatttaaatggtcgcgtatacctcttgtactcaacccaattatgtatttcttttactctaaaaagtattagttatacatataaatttcctgcatatgttatgtatgtggaatttatttatttagtttttactaagttatgttttgggtcttggccccccttaaattaaatttttggctattcccctgccaacaactagatacacaagaatagtaattagggaaaaacttccatccctcaataaattttataaagctcgtcatttacctgagtgcatggttgaaaatcatgagaactgtaatgaatgaatatccatggaagaatcccctgaataaagacataaggcatatattactgacgtgacaatttaggctttataactacaatggaaatatgattgtttataatacttggtactgacttatatgatcaaacaacatatattatgtgttattgttatgaaccttatcgtaggatcaagtcacaagcctagacatagaagacttctgtcgacctatagtgaaagaaagaagcagactcgtccttgactgagcccctcctaaactaacacaagtttttctgaatatttctccttgattaaatttcaatcaagtttgccatttaaataggctacaaaaatatccctaacaattatcctaattgatcataaatgataaaataaaaataaagagaatcctaactaataattatcccaaagaatataataaagatctgatctgaaatcaagattctgatatcaaacttattaagatgggaaaagataaaataaataattcaagatttacatacaataatcctaatttgaggccttatcagttatcccatttgatgaaaagatttacttcatatatgaacacaagaaaatagcgagcaaagatcaaaacaaactgcaaagtcaaaatctgaaagaagagatcgaattacttgttcatcaccgcatcaaaatcttgaaccaacattgcaacagcattgaaacacatgccaaagacatataaccagaagttctgaacatttatgttccgtgaaggacgcttttttataatagcctgccaaaaattatgtaagaaatctactaagccacaattgatagctaacacatcttactcgatgctatagtaatagagctcataaaccttattttaagcagactggcacatctccaatgattaatcaaatttagctcaagcattaataaattcagatagactggataaataatttcaacttaatacaaaaagcgtttgaatctaaaacaatttttaagcagaatattccatcagtcaatagtagtcaacagaacagagaataattttggctgtagattggagtggagtgccatttcatgaaacctcaagggaattaatgaaactaaaattacctcagtatatactcctgcaaaaccactcaagagagccatgacctaaaaacaaaaagttcatcatgatcagtttcaagccaaaaattcagcttatattactttatactcctaatgtgaaagcaccacaaacgttaacaactcacaattgccatcacccaaccttgaaagggagtttgaagaacatgatcagaactgaaaacacaatacaaatttttccagataaatattaaaaaaaaaaaaaaaaaaattatcaataaaatgtaaaacttctgcaataccttttgtgtgtagatcgcaggtatattcctactatttatgtatgatacaagcaaggagaagttactgtaatacacacatttttcagcagtcacacttgctaaattactaacctatcatttatggttcatttgtttgttacatctatacataaaaatttcattaacatgtttattactagagaaaatctatacaacagtcatgggaacatacaaatacacaagtgatggccacatgtcagccttaaattattcttacttcgaattcaactgggctgtagtgcacccagcagcgagtagaacaaaagcagcccactgaatctcacttaacctgaaatgtaacaagaacacaatgccaaacagcgaacaatgaattttggttatgtaatgagtccaactaaataacatttctcagtcattaagcttaaaatgattaaatatccaaaataaagaataataacaattaattatgttcatagaacatttcataacacaatgagttataaaacaagtgaaagtacgatggaaggagcttttccttctcgtttttgtccacataaaagtttggcatacagaggacccgacttgcattgatcctccactacagttctcatggcgaaaggagaattgataattttttttttttttttgcatttgaagaagagagaacaaaagacttaccttttcttaagtataattctgtataggacacccgtactgataatattaaagttctttaatatttgatagcctggagcatctacatatgcaaagatgtaatactgccgtaaattgaaaagtaaatacaatcagattcagaaagcattaacatatctgttgcaataacaaagttgtagaacaatcccattgccaccataacaaacaaccatccatcaccaacctgaagcaaatttttgacaaggtaaagtgctgctggaataggatacactataacttcatccaaggttgtagtcaacctatgtccaaggaacaatacacatcaagttatcaagttatttaaactcattctatatataacaccaacaaggggttctagctcaattggttaagcaatgtgcgtgaattgttgcgaacccagattaaaagaaaaacaccaacaagggggaaaaaataaagcttcaataaaaaagatgaagttgcaaatacataaacaccaccgggaaaattaagtgaacccattggcctactcaacactattaacaatataggttctagccttatgaactcctctccacctaaagaacactgttcagacactccccccaacacacataaaataaacaccatataaaggaatgtttgtctgtttttcaaaattaaaatatcaaaaaatagtggttttgtagtcatggggaatacagttcaaaatcacattaagacagtttttggttttaagagttaccttgtaagaccatataaccaaatgttttgattaccaagtgcaactgtgattacttgtatatgatgaagtattaaattttcaatcagattcacaaagtaaacaactaatttcttcctatgaattagccatatacaggttatttcttcagggaataaggaagcccaagagtttacaaatgcaattaacagtcaaattagtccagttctaaaaatgtcaaaaagatcggattaaaaatgttcacaaccataaataaagataaaatgcactgttaaaatgttaatatattccctgacttgcagctcttcattattgcggacatagtagtatttaagaaatctaaacaaaacaaaaaatggcatcacctgttgtcctcattgacaccgtcttttttccatattcttcccaaggccaccagggatatagcacattttaaagtctccacctataacaaaaagagtaataaagcaggtttaggtttgaagttatgaaagataataaaagtagaaataacagaatgagcgtataggatatgacgatgtgatataacctcaccataaagttagcagtagtgacactatactcatacttgccagctctcttggaccaaacgattagaatggcttgcgaactagtaagaacagtcaatgcaagtgtaacaactgacctataccaacaggcaacagggataataattaagaaatcaacaagtaagtatttcacttattatatgtgaattgttgtcatacttgcgcttccactttactttctccctgtggctgtcaattttggtttctccctcggaagtcaaatcgttatctgggactggaagagacacgaaacggatgttacattaaaacaacacaactatccattattcagcctggaggagcgatagcgataccactacctgacagcaaaaatgattttccaacgtcctcaacgtccgcatccctaacttcatcctacaacaacaatgcatcaaaatcgtactattaattgaagaaatatgcgaaaaaacactcacctcgtctttgattttcctgtattccattatatcacagagatctacgctttgtgcattggataaacagagttcaaactctaaactcttactttccttgatgcaccggcaacagatctcggcgctcaccaattatgatattataaggccacgctctctttctgatctctctttgctatgcataaacaaaagtttactatcacattaaattagacttaattatatttttttataaaaaaattatctttaataaattaatttgacgtattttattaaattttttattataaattttatttttaattttttatatttttattaattttatccttaacttttaagcttaataatggaaaaatggtcgggataatatatacaatatattataaaaaaattagaggtaaaaataacaattaagtctttaaattatttgtgtaattagatgagttttgaaaaaattgattttaaatggaagtgattttgtaaaattaattttaaaattatgtttatggttgtatattattattataaaattaagtgaggagtaaaatttagtataaatctttttatccaatacaaaagttatttaaaattgttttaattcataattaattttgaacttttttcaatgaaatcaaatatgtcaaaatttatccaaaattaaatctactcaatcaattatacaaaataaaaccaaacatacactaatgactttggtatcataaaattacacaatttttacctttttttttctttaaacatttacaataactctcttacaacacataatgatgtaatgtataaaggaatatcaatgtatattttttaaacaattaaaagatcactgcaagggtaaaaaaaagtaaggaaaatttatgtaattttataaaagtataaaaatatttgtataatttactcttattttagtaattgttgatcattttagttttccatgtttttataccactattcatctattttattttataacacttcactttattcatttaataattcattgtctaatttatttaatgtttacaaactaactttttttatcacaactagagttatgttgtttgaccacgttaaaaaatacttcataatagcattttttttaatccattaaaaaatcacattaatctatcttgttaaccattaacgtgtaaaaatggtcccgtttcatttctttcttcctagttcctactatgagctatttgtgcctttgaaaaattcattttccttcacatttcttctcaatctggtgattatcattcaaatacttttttaaatagacaacaattaactcctcttattattattatttttttgcaaatttcttcttctatttatattattgtgtgtatatatgctttggcttcatttttgtagattctatttgtgccttaggcttcatttcttcttctatttatgcttttgcaaattttctcttatttttttttatattgttgtgtgtatatatgttttggcttcatttgctttttatattgttgtatgtatatatgttttgacttcattcgcatgtatatactccatttatccttattcttatatgcagatcgaagtcgttcacttctctgtcgaaagagcgtattcttttattatagctaattacaaatctcaattagtcttgtttgtacaccaatcccaatgactaattcgactcttaagcctggaacacaatcaaaaagaaattctcttttgtctctccctcgaccaatttttacattagtgggcggacaccgccccaatcctaaaacaggaacgaatctttcaattgcagttgaccacaagataaagaaagcgattgaagcaagcattagtagtatcccccttccttcgttgtaggtccccctcccttaattatttatttagaatatccctttggctatcaactcaaagagtaaagcggtggtaagatatggatttttttgtgctaatcatattttttcttaatatatagattatttatccatgtttctcgcatgtattttttccctctaaaatcttcaaccatatttgatatttagttaggacatttcttttagtacacatgcctccttgcgtttttgtggtaaaattgttaaaagcttgctaatggcttatttttctttcttggagacatttactgattaattagtcttttctttttttgttcttttatcttttataaaaaaaaataacaagggtaaaatggaaaaatataatctttatacatagcaaaaaacacttaatattgtttgtgccataatagattatatacatcatacacttcaacacatatttcatgcatctatcttaattttgcacgtactagatttttctaacttttgcttgttttccacaatatttgtactatcatttaaaatcacaaacattcaatattacataaaagggttttaatatcggttatagaggaatttcaatatcaattttagaaccaatatttaaactgtcattgaaagtagacatttttaatgtcaaatttaaaatcgacgttgaaaatcattatctacatcggttagctgaaatcaatgtaaaaatgttgccaaaattatgtattttgaagtgttttctacatcgattctgaaaaaatcaatgttgaaaatcgtatacaacatcaattttttgcaaaatcgatgttgaatgtgttaaaccacatcgattttggccaaaatcgatgttgaatgtgcctttataacatcggttttcgatcaaaaccaatgtggtatagcacattcaacattggttttagaccaaccaatgtgatatacttaaatggttagcattgtgcacaataggagtgcccttgcactccttgcacttacatttttgttctcctaacaacagagttttacattgattgaaaaatatatgataaaaataaataacataataaaaaagtatcttaaaagaaaaaagtaaaaaaaaaaaaaataagtaaaataacgttgcacaagagataataaagcattaaagttgttatagaaagctaagtaaatataaattacaacacaaatctattgaattagtattgtcattgcttccatatgttaataacaataaacatcaagtttgtagaacctcaatatagaaaaattgttctcaatttagagacaagacaacaacttccaaaaaccacttaatgagggaaaggaagatgaagaaagagcaaatataagacgaatagcctacaaaaaaaagtgaatgctgatgaacaatgttaagcctaaaataacgttgattcagtggcaatgtcgtgtttggttagagtaggttgcactacatatgaacaggatgtacaacaagtaaattgtcaatgacatacacaggcaaaacatctgataatcctccattactaaactagagattcacaacttgtgtaacaggaaaattacaaggcaataatcagagacttcttccttgatagattatgtcaatgggaataacctaaaaataaataccaaaatttgagccactagtgtcactgagagaaagctaaacctttacgttttcacattgaataacctgagaataaataccaaattttgaattagaaataatttttttttatcaagaacaaagatgtgattaataaggcaatggtataaggatgatagagttactaatatatctgagctttacatattaacattcatagttttaggtaatattactaaaatataaggcaagtgcatatttttatccaacttctttcacaaatatttgcagcatgctagaaaataaaagaaaaatactatatagcaattagcaaagagaaaatttggatgaccttttcacaccttaaataaaacattgaccttgttaaaacaataaacgcgtgattcatcaacatttaaagagttataataaatgctttaatgaaaattgtgtggaaattaagaaacaactattttgcttttgatacgtacctacatggatttaattgtaggcatccatttgccatggcaatttaacgagctttgaattaatccattagtggtcctcaaaccttgtattagaaactggtaacttttactgatccactatcaagttgatactactaccttggaaaatacagaaacgcatctatcagcaactaggcatagtagccctttggttttagatgagacttgcacatgcatattatattacaaatgcatgacttaactcaatagcaaattgtttcaaggaacaacttcctaatctttacacaccatggtaaattgtagttgacttggtaaaattcaacttcagtgtaactctaatttttgttatcttacacattcagggacgaaaatggttatttatccataaatttatttataattatactatcacattttttttatcttatattgcttaagttcaccatcatattgtaatgtctaagttggtttcttatatgctttgacaaattataatgatttttttttcctgcatataaattttgtttatccatttctttttcctcgctaatcatggttttttgtacatatttatgcataatattataatctttcatgagttaagtcatgaacaaatcattgttatattaattttatagtacatagcatgatttgatgccatattttgccagttaagttttcaactatatagtttttacttatttttaaaaaaaaatatttatgaatggcgtccaacaaacttgttatttagaaaatatacttaatctcgttcaaatggtgtataaagtcaacttcattggagagattaatggcacgagagacttggaagttggcaataagaataaatagtatttggcatgtgcagaaatctcataaatcagcaatgatgaaaatgaatatcatggatgtgaagatggatatgaatatcatggatgtgaaggtagtcttatattgcttaagttcaaaatcaaatggaagataattgtttattgaatttaatttgttcatgacgtaggaagataaaatacaagttgcggtgaaaaaatatgatgttgaaaagtggtagtcaatactcaaggagggtaatacctatattttcttgaattttgaattcattgtaacaacaaacaatataggatttctagggatccattaaagttggtgttcacgaggagattaggggaacaatcttaaaagaaatataatcttagaatcttagaaaacaacaaattattttcaacgttttctgtacaaacctttgaaaacaaattaaaaccaaattaacagttttataaataaagggtgaaaataaaaaataaaaacagaaaacaaagctgcaagtaagcgccccctaaaattcagagattcaaagaatatattttataaatagttggtgaataaaaagacaaatgtgaatatcatgataggaatattaggatgaattttgtttttattaggtccaaatgtttttttttttttatgtttaagaccttagcatttagaagcaacattattagaccttgattaatttaacttttttcttggtacacaaaattaaagtagaatacttataaacatatatttattttctctttattttatttcaaattatttttaaattttattttcttattatatcactcatcacatctatcattttttatctctattttttcttttatactctaatccactaaaaaatgagataaacttttatatttttttactttgaatcaagtcaaataaactcacttaattaaggaggtaaaattctctgagagttcatattcttaatgaagaatatatgacttaaaaaatttagaaaatgtttttgcaatatataaaagcaaaaagtagaaagtatttgaatggagcattattacaacaaaaaacacgtgagagaagagccgacaattacattggcaaccaatgaagcatttggatctactattgaatttggcacaaaaacacctcaccaaagcgtcttggattcaatgagagagcagacaagtccagtttaaatagcaacacatcaccgaaccgaaggcaatgggtggagagagagaaatggcgaatggtgactgacccagcagaaggaataaaacaggctgtggtagagctgtaaacgttccatttcaccactcttatgatatgatatattttctccgaaaacatagctttgagcaaacagcagagcataatgtttgggtgtacaaaggcatcatcgctgccagtgtcgtcgcgttcagaggaaggaggccttcgaagacgtctttcttcgctgtctctgaagatccaagacagcccaacatggtcatttcccagatccaagtccctctcatccatgggtgactatgcaaggacatggtgggactggagctgggcctggatcctctccaggaagctcatctttgccacagatctcgaaattaacgaccaggaaacaaagctccttggctcccacaacaggggcacttggaggcatgttttctataagcttcgctctgagatcagaaggttcatctctacttctgatcacgccactcttcccaaaacctaccacagttccacccctcaactcttctcataattccctccacatttctcaatgcttccttcaaataatttactctttatttcagatccaccgtggaaagcattacgtaagccaattttatgtacaattcattcttcatgttaatttgtttcctgtactcagttaattacgtgcatattctattaattgtggattgttataattaaatttgttgcctaatggaaacaattgaacatcttatttatagggtgattgttgcatactgtattatcttatagttgtattctatggtgaatgtagaacctgccatttttctgtttcagaatcccctgccctgcccaagtaattcataaataatgattgctgaattctgaacttgttgccgtgagattgaagtttcctctcccacgtcctcctattttctcctttttcattacacatcgtctgatgccgttttacgtcgcggttataatataattaagctaacttccttccacggttccaccaccatgttaccgaacaccattattattgctttgtgtcggtgcacaatttcttcttttattttctgttttttctttctaaataacaaatatagctaaatcctacatgcaatgcttcgtttgacagttggcggtaaggaagaaaatcatgtagagaagataaatcggtgagaaacaagtaacgtaaaaacaaatatgtaagaaaatgagtgcatttttatattgtttttgtaggtatggtaaaaaaaatagaaagaaatgcttaatttttttttatatatatttgattagaaagtgtaaagaaagaaaataacgtttttgtttaacacattatttaaaaaaacataagattaaatgacaaaagtatcaaatttagtaaaaatgtacacaataatttttttatcgagaataatttttatcaatttatatgttgaatttaaagttttcataaagtataaataaatcgatactattattagattaaatatcaacaaatattcactttaatttttcttttatattatgagcttatacaaaattatcattaatataattatttaaaataattattataaaaatcaataaaatttatcatattcattttttactttggacctcaatgtccccacacatgattgttcatgatcttcttaaatagtcaccgacatggatctctccagttagaaaaaactggaaagtgccgaatttacaaatctcatcaccatttatacatattttttttaatattttatattttaaaattttcaaatattaaaataagctaatggttaagatttcatgtagttacaacaatttagttcatggatcatgaatggtcccaataaataatttttatttaataataaaagtatgagtaaatagtatataaaattagaatataaaaagtttcactttatcatctaatcatataataatatattaaatttattaattttgatgataattattttaaaaattatatcaataataatttaaaattgattgaaaatgtaagtttaggtgaatgggacatagatattaaactaaaaagtattgtgtgacctaaattaatgatggcaacccgtggaacatttgaaccagctgtcgtgtttctcaattctgtgaaaattgcaggttggtcctttgtaaaatatagggtggggaagaaattttgtgatttgggggttttgttgcttcatttgcaaaagcaacatgatatgatgtgagcatgcatatcaaagctacaaatccttatagaaggacaacttgtggagctcaactgcatcgaatagtggcagctgatgggtcgtggtagtccatgtgtgacaacccactttgtggcttgtgctacaattttaatgtctttttttttttttttttatcatggaggtgagaaagagaagggtaggaacagggcgacacaatcagcaccggcggatctacgtaattgagagtgggcagatgcatcccctcatttcaataaattactagtatttgtcttaaaatattatattttacatcccataattttatattttgcactctctaattttatgtatttgaatctccttacaagtttacatgtaagagtaagtaaatatatcatcttattttaataaaatgaaaaaaatatcatattttgcaccccataattttatattttgaaccccttaattttatgtatttgaacctccttaccagttcacatgtaaaattaagtaaatgcatcctcttattttaataaaatacaaatatttatcttaaaactttatattttgttcctcttatcttcgtgtttgaatttaactatcccatataataatgataattatcaatttttattttttaaataaattgtccccactaatcagggtcctagatccgccactaacaaccgggaaggagaattcttattgggacgatttgttattggcttactgccacgatgagagaccattattttggtccacttccctgtggatcaatttgttgcaaattcgggttcacatcgaagattgtggtacattaggatgcatgcaggattagaaggtgatagagatcgagggatagtttgttgaaataggtgagtaatagtttgttgaaatagctgtgttagtaatattgtcgaattcaccattctacttaaatttgggaggtttcataaactgactaataaaatcgattcgtaaactcataatagtttactcaatataaaaatatatattaatattcttatatataaaatcataattaaatattttaattctaaaataaatcaaaataacaaattttaacaataattcaataaactaatataattcacacccaatcaaacataaattcatatcatacaaaacataaaacataagttcttcaaataaaagcatttaaaaaacataagtaattcaaatgttcatcaatcttctaattaagtcattttcaatatcaccatcaccatcatcatcttcatctccatcatctttaagttcttcctcgattgagaagtaatcttcaacattgtcattcaaaatcaaattgtcaatatcaaatgcatctaaagttgaatcacttaaacttcttcctccaaccacatcaatattacttccactacgactttcacctagaggttgctcaacttgaacattgtcttcatcaaaaatatatatccctcttatgttatccactcatcatcacattccatatcttcaaatggaagaacaacatttttttcttatttgtctacttttcagattcaagttatacatcacataaactaagtcattcatattcttttaatgcaagcggtttctcctctttgtatgaacctataaataatataaaaaattgaagttcataacttaattaaagtataaagtctaaactaaacaaaaacaaatattaaaaaacacaaaattgtaaaatcgtacgattctaccgagtttggtctaattctaccaagtctggtccgattctagcgagtttactccgagtctaccagaaaacgattctatgtgcgattcaactcgttaggagtgtgtagactcacaaaatgtatgattttaccatttaaaactagagtttgataaccaagttttagtattggtagtcaatagaaacaaataatgataattgttcatttcaatattgatctagttttatttaattaattaatttattgatattaagaaaaataattaatttaattgataataataaatatttttttattttttttcaattctatcattatcattaatattttttttctctatttaaaattgtgccttaaaaacaagctatttttaaataaaaataattaatataataaacattataaattaaatcttaaaataaaaagaatataatatcacttataatttgaaccttataaatagaactaaacgaaacatggcctcttctaatcctagacataaacaacatataaccaaatcatcaaaataaaataaaataaaaaagtgattatattagttatctttaattaatactaacatacattcaaattgtattccaaaaatatccgtaaatgatgattagatatatttacactactcataatccaacatatttttttcaaccagtaagaataagttatattattaatatctcattaaatacatccatttcattgaaaatgagtgatatcttactaatagacctcatttattaaggatgtaaaagaaaattagccactaataatttaaaattgattatatatttcttataattaataaaaaaaaataaccatttgtttctttagccgaaggtaatatttgatcaatagttcaaacagttaacatcaaattaaattaaataactgctatttttttatttattgaagaatgtttggaccaactttttctaacacattgtttgatactaaattcatttctttttccacattaattagttcatgagaaagcgaaagagactaaaaataagtagttcatgagaaaaataagcagtacaacttattttaaaaaaactaattcacttgacattttttaaaagctaattcccccctttttcttttataaaaaaaaaaaactgcttaattttttaaagaattttactctattttaaaagcttttattttgaactttctttaaagtaagctttagctataaaaaaagctagaataatacgtatttgtttagggaaagaaaagccagctgggaaataatatgcttcagcaatgtcactttaacacaatgcatcatactccacaaaggcttcttagtacgcccaatacatcatatcatgcgtgtgaaactttacatccgtgaaatcaagtacttgaaagatcaaaatccttctactaaactatagacagaatgcccctacatgaaagcacagaaaaatagaagaccaactcgaagtagctgtaacacccaacactaaggtttacaaagcgagaaacaatttttccactcatacagcacataaatgtaacatttgatgaatcctcatgcgtgagcacccacaatcctgattgttcttccgagataggaccggtcagcaagtatgaacaattttttgtaaagatttttactttatttttctctttttggctttgctgcatacaacctgccaaaattgcattccagaatacaggaagagtgacgttaacaatgagagtaataaaaagtcaacagatattcagctaatactcgttttggcaaactgcaggatataaactatcatgcaagacacaccttgttggaattactgcttaaatctagattcaactctaaatgcattattcaagatgcagaaccaagatctatgattggaacgatatatatttacaaagatgtgcttaacgggagtcccacccccaccctaagtttggtctcggggttacatctttttatataactactactactactactactgtatataaaattgcaaaaggttcatcagccagttggctcacgcacacctccaaatgtatgcagatatgctgccttcttcagtttatacttccataactcaagctaacctaaaacctcaaaatgatttttttttcatcaggaaatcatacaccaacatattacaaagaatatgctatagacaaggcagctccatagaggaccaccaatatcctgtgggttgatagtacgactctaacatgtattccaaactgtcattaccctcttctggggagcaagaatccaatgaataactcaacttattcagtagatttgatgggccatcattagaagaataaaatcaagtctagaagtatctgctaaagaacaagcagacacaacaaaatctgggacacttcaacttcaattcaacagccatctgcacaggatgctttacaataactgatgctaaaatgtgagcagatcccaataaaatattgggtacatacgcaaatgggacctatataaattgggaaataaggcttgaaatgtcatgaagtgataactgaacttcaatcaaatcatttcgggttcttaggttcatgatgacttcttgtgtacaattatttggaactttaacttccaagagtgagaaactaacatctattgcctatatgtctattccaaccactagagatggcctaccacataatattagaagtatgttggtgattacaagacataccatttgtgatgccttttgacctctacatcttaaaaattcataagaatataaattataaagtgggcaaatagtatttcttacaggggataaaagttctattttacccaaagccaaaagtacctgtacataatgagcacaatcgtaagctattgagcacttggtgcatctctcatgcttaaattcagactgttgcgcatagtcctcctaccaattccagcgttgcctttttgcatcatggcagcaaattcaccataatcaatccttccatcctaaaacaaaagatataaacataatcatgaagcataactgcacaagaagatggtccaggaactaaattcaattcattattgataggcgacaaagaatcatgcttgacaaattattagaattcaggcatttgatatttaaagtgtatttaaggcatgatatagttttgattaattaattgtttttcacaatctgtgatcagaaaacgtttaatggatagatcaaacataggtcctaacttcctaatgcataattcttgtagctttgaaacgaaactccagttaatgcaggataaatgcaaattaatatagcttaaaacatgtaagcattctttaaccaaagaacattctatatttcaagctaaaaaccatttaagttattgaagtacatattacagaaaaattgaagactaaaagagcagtcttttaatgaggatatatattactatactgtaagatcttctaacagcctacaaggatttcctatgtgaatgtttagcacaggttaaacaacttacattatcttgatcaacttctctaataatatcttcaagaaaagcatcagtcatgttatgttctgcacaagcttgttgaagttcatcaactgtaatgtagccactaccatccttgtcaaaatattggaatgctgcaataagatgttcttcacgctctagtttgttgagatgaacagttgcagcaataaactccccataatctatggttccacttttgtccacatcagcctgaaacaactcaaaacattttagctgtgaatgaaacatgttcaaagattatttaacacgaatacaggatgtggctcaaaagaaaaatggagtaatgcctgtaaaagatgactgaatagtccctggttttcactaatgtgatgcctaatgtcaacccccggctttcgcatataaggaaatttaaaatattatatttaaaaataataactaaataaaataggaagtataaacacgaaatacaaaaaagaaacttttcgcagaaccaacaacctaccgcttccataagatcacgtatttctatatccttaagggtagacccatatcttcttagaccagctttgagttcatcgaaagtgattgcaccactgttatcagtatccatagcctgaaacatttctctcaaaccagcaatctcctcttcggatagactttcagcaatcacctaaaaaattagtataataagcaattataactacggttacatagtttcagacaagcaaaaggataatagatgaaggagaagtgaaaacaaagggcaagtgtggaagcccaataaagtgaggttcatttggcatccaagaagtgcttgactccacaaagacaacaatagcactttacatatcatgtatggaatccattatctttttcataacaacgtatgagctacattcatacatactatatttattcatcaattagcttcacttagagaacgagccctgacataacggtaaagttagatcttgatgatttgttggtcatgagttcgaattcagaaacaagctctttgcatatgtaagggtaaggctgcatataatattacaatatccctcccccttacctttacatagcgaggagtctctgggcaatgggatacaatgtttttttttttttttttttttttttttaattagcttcacttactcgcagagccatcttctttagcttattcattgcagaaaactgtttgagacgagaaagaacagcaggatccagtgatctgtcaggggcaactccattctcacatatccaaggatgacctaaacaggcaaatgacacaagtaacattgtcagacaacacattgaaacacaatattttgaatatttacaaagtttaatccttaaggaagttaagctggaacttgcttttgaggaaacatcaacatccagctaactattaatttagataggactatttcttcctgggtgagtctgctatagatgtggcaacgaccacaacgccagtgagactttaatcacctattacatctttaataatgaagataactttgaatgtatgagtagcacaggaaaagccaatttctaatgctcagtccctcaattacatctataataacatccactgagtaaccataacgacttagctactagtgcaaaagggcaaaacaactatgcttttgatatgagggtggtccttgctcatagtaattatcgttaaaaaaaaaaaaaaaaggaagaacatacataacacttgatgagcagtcaaccgttctgaaggctgagaacacagcatctttctaatcagatcttttccactgtcagatattaaaggccaaggatctgagtcaaaatctatatgtcccttcaatactgcatcaaatataccctgctgggtctctgaactccaaaaaggacaaaactttcagtgatgaaacagatgaaggacaggaaatcaaaagagtgtaggcagtaagatatacctgcccaaaatggcggcacgccactaagcaatatgtacagtatgacaccagctgtccacacatctgcttcaggcccataatgcttgaggagaacctcaggagcaacatagtacggactgccgactacatcagtgaaaacttgacctgaggcaaaggttaaatgaatatttaaacaacaataattagtattaaatggtgttccctaaaatcctaatgggaatacaaatgtatctcaataaaatattgtaatgttgttcttaaaagaagatataaagagaaaagcagagttgtttgttaccgaccgggtttgaagaaaacagagaggccaaagtcaattgctttaagagagaaatcatcatctttgttgaccaagagaaagttttcaggcttgagatctctatgcatgaccccaagggaatggcaagcctcaacaaccccaacaataattttggtcaactccgcggccttcctctcggtatagtggcccctctggatgatgcgatcaaacaactcacccccggaacaaagctccatgacaatatgaacatagagaggatcctcataagcacccttgatggtgacaatgttcttgtgaccagctaaatggtgcattatctgaatttcccttctaacgtcctcgaggtcctccttggaaatcaacttccttttggagatggatttgcaggcatattcaatggaggtagaattctcggtgcataaataagtggtgccaaattggccctgtcccaatttacgaccaagagtgtatagatcacgaatgttgggagtcttatggcctaagacataataggcttggttgtcgaggccgcggcgcatgatggcttctctcttggcgttgaagggaagattgctgttgttgttgttgttgttgttgttgttgttgttttcttgctgcttggttgaggagggatcagaatgggtggtggagtgcttggaatggtcttcgggctggctgaagccctgaatatatttccctttcaaagatccgcggcatgtgttgcccatcaaacaaaccaatttatattatatattcatccaacgatctcctctcatcagcttcttcccctctgctctgctctctctctctctctctctctctctctctctctctctttttctctctctctctctctctctgttgcgctcacctcacaaacaaatcaatccaaaaaaactattcattcatttctttcacatcacatcatctaatttcaacacccacccagacccagcagaaaagaatgcaatacaacaataaagaattacgaaataagcgtaccagaagtgaaggtgaacgacgaatggaaagaggaataactttcgcttctttcttctccgacagatctccacaaaattagtttccaaaattatttctattttttatttctggttaattttaggatgattggattggtggtggtattgtaatttttgtattggctcctgccgagaaacatcggatgttagtgctgaccagctacgcccacttctctctctctctctctctctctctgtagaattttcaattaaatatcacgcggctttctttttcatttcctttcttttttctttttggttcaattcaatgcatccgagatcaaaggggcccaaaacaagacaccaaatctttatcaaagctttagacgaaacttaccttttgattccctattttactaactacaccgtctatctaaaaattctaaattttatttccaaaaaacacctatgagtattttaaaaggtcaaaaccattcttcaccaatttttttctcagattacagcaccactccttatttcaatgcataaatgagagattaaaagcaggatgattttttaaataaaaatttgaacacttctatttaccagaattgagaatatatttagtaaaatatcaatctatattttaacgtgatatttaaagttattgcagccaagtaatggaaaatgtttcttattttcatattgattagttagcacgttgactttaggagatacagcagtcatctatgttagatattgttctaaaatcgtggaatctatttttacacaactatacaatttacatttacattttataaaggaaaaaatgtctcaaaatattctaaaatttaattttacactctttacaaattttatacgtttttaatatttatatttattaaaactgatgtatctttaatttctcattgaagactaaaaacacgtgtttttgttaaatggcaaggactaaaaacataaaaaaaaaaaactcataaggactaaaattagcatttcaatatattttaagagactaacaacttattttaactctttcaaaaaaaatattagattgggaaagaaaactaaccaatgactcgttccaacaggacatgagcaccatcatcaccattgaattctcaaacgaatttcattcatttaagaacaagatatgatttataaatctcaagtgtttatactaaaaaaacatcatgaaagttagcactaccataggtttgacaaacctctaatgtccatacttaaaggacatgcacataaagatccaaaagactttgttaaaattataatgtggccggccaatgtataggcaaggtataaaaagagatagtgagctagaaagaatagaggagaaataaggaaaataacctagggaaacaaataccaaaaaatggaagagagagaacatatcccatgaattccgccaattttgtttttaaaaattgacatttaatcaatagaataataaaaagcatttcgtaacaacactcattgtgaatggcgattctttgacatgtaagcaaatttggatgagattttaaagaaaaagggagccacagccacgggagtcattcattcacttataatctaccttttagcttagccggcacataggaataggatcggttacatcatttttcttgtcttgtcttgttttgttgagtcgaggtagttgtagacttgttttgttttacatcatttttcttttcttgtcttgttttgccgagtcgaggtagttgtagacttgttgtagtagtatatactaatactgtgccgctatgctagctacgcccaatatcaatcagttcagtgaataattttagaaaggaaagatcaccctcctgccctggccccaactttattattatacttttgttctatgtccttttatgcagtatattattcttgaaagttgaaacttccaactcaaactgattttattaggagagatgaagatggctttacgttctggatccgatctgtgaactgtgatccatcttcaatctttcagtaacaaacatgagcggagctgttcttgttgctgtggctgctgctatcggcaacttgctgcaaggatgggataatgccaccattgcaggtcatatttttattcggttagccaattaagataacattcaaccaagtctaattggctttctatgctatgcaggatctattttgtacataaagagggagtttaatttacaaagtgaacccacaatagaaggtctaattgtggccatgtcacttattggagccactgtcgttacgacatgctctggacccttatcagacttgctaggccggcgtcctatgttgatcatctcctctatcctttattttgttagttctctggtcatgctatggtctccaaatgtttacattctcctctttgcaaggcttttagatggattaggcattggtttggcagtcaccttggtacctctttacatatccgagacagctccacctgagattaggggattactaaatactcttccgcagttcactggttctgctggaatgttcttttcctactgtatggtctttgctatatcactcaccaaggccccaaactggagactcatgttgggtgttctttcaattccctctctcatttattttgcactcacactattcttcttgcctgaatctccaagatggcttgtcagcaaaggccggatgctagaggccaagaaggttttgcaacgactttgcagcagacaagatgtcgctggttggttatgcatttatttgatttgatttcatcagttcttgtttacttgcccttgatttggatggtaattgttcttggatatgatcaggtgagatggctttactagttgagggtcttggagttgggggtgataccgctatagaagagtacataattggtccagccaatgaattcagtgatgctgagcagatcaaattgtatgggacagcagaaggtcaatcctggattgccaaacctgtcactggacaaagttccattggccttgtatctcggaagggaagcatggcaaatcaaagtgctctagtggaccctctagtgaagctctttggtagtgtccatgagaagctcccagaaacaggaagcgcacttttcccacactttggaagcatgtttagtgttgggggaaatcaacctaggaatgaagattgggatgaagaaagcattgccagagagggtgatgattatgtatctgatgctgctgccgcggacgactctgatgacaatttgcagagtccattgatctcacgtcaagcaacaaatgtggaaagggacatgcctgctcctgcccagggaagcatgaggcaaggtagtcttttgcaaggagaacatgctggaaactcagggattggtggtggatggcagctagcatggaaatggtctgaaacagaaggtgttttcaagagaatatatttacaccaagaaggtggtcctggatctagacgtgggtctctcatttcacttccaggcggtgatgcgcccacactaacagatggtgagattgtccaggctgccgctctagtgagtcagtcagccctttacaacaaggagcttatgcatcagcagccagttggaccagccatgattcatccatcccaaacagctgcaaaagggccgagttggagtgacctttttgagcctggggtgaagcatgcactgattgtgggggtggggattcaaattcttcaacaggtaatgacattttttgaaacttctgttaatctaactttgatgaaattgtcagaactatttagacatattagaacattttttaaatctcaaaactcattcagtaggtgatctattcattagcccattgtacctagtaaaaagctatgtctgactgtcatctaactcctcttaaacatcgcagttctctggtataaatggggtgctctactatacacctcaaattcttgagcaggcaggtgttggttatcttctttcaaacctgggcctcggttctacttctgcgtcttttcttattagcagtgtgacaaccttgttgatgttaccctgtatagctgtggccatgaggctcatggatatatctggcagaaggtatgaatctttctcttatcattttttgttggcttctacttaaatggtaagatttgtttcaataggtggatgtatcctggagatgattttctcatggacatactgtttccattgcatattttccctgtatgttctttgctagaatattttgcaatttagggtggtattcaataacaaattgggtttgaaattactactattgcaaagtgctctcaaactaaaggaaaatgatatcaaacagtaataagatcaacgattctacatgatcagtaaatgagctgaaactaagtgtgttgtagatgagattgctgaggtgaatgagctgacaaagaaaggacaagattaggatttaggaatgtttttatatccaagggaatgttgaagttagcatctatagataggataatggaaactcgtctagtttgtgcgaagatcaatgaaggatccaatgagaaaagttgatcgaattgaagtgctctaattaaaagacaaagtaaaacttaggaaaacattaggagaagccattagaaaaaaaaagcagcttgcttttcatttcttttttttagttttggtttttgatttagctcagtggtgttgaatgatccatatacattgactccacctagtgaatatggcttggttgtggtggtcctggtggagacggtgttttgttttctattatttgtaagttcctatatgaaagtatttgcgataattctggaaattgtaacctttataatttggaaagtatttgaaagattcagaacttaaatatttgatatttgtgagttatcttctccttttgttgcttttcttaaccccttgttgtgtatatttcttcattgcttgtttttgttcattcaatctgcagtactcattggtgacatttttctatttttatttatttattcagaaccttgctgctgactacaatccccgtcttgatagtatcacttctcatattagtaatagggagtcttgtggaattggacagtactataaaagcttttatctcaacttcaagtgttattgtctatttctgttgtttcgtcatgggctttgggccaattcctaatatcctttgttcagagatcttccctactcgagttcgtggtctatgcatggctatatgtgcacttacattttggatatgtgacatcatagtcacctacacgctcccagttatgcttaattctgtgggccttggtggtgtttttggtatgtatgcggttgtttgcatcatagcttgggtgtttgtcttcttaaaagttccagaaaccaagggcatgccactggaagttatcaatgagttcttctctgtcggggcaaagcaagctcaagttgccaataagacctgactttacatacgacccattggatcttttttaatataaaattattttcaatctatggatttcttgttttgtttcctcttgaggcaccttcatcgtgggctgggatttgggatttgagaaatgagaaagtccaaaggaaactcgttagtcaataaaattataagcatctactataacattcgaatttgatttcataacccttatttattgactttataaaatgttatttactttttttttctttttttaataatacttattttagtccttagcgttagtgcaaaatattatgaagaaaatattaaaatatagtattttataaaattatagttttgtgaagttaaattttagacatacataatgtcaggaagtaaaacgagggtttatacatagaaattagataaacgttcatttttaaatcttgttttatgcggcagagatgttagggaaagtaggaatttttggtataacaaaaataggaacggaaaattttaaggtgtctaccatagaaattatagtcaatgttaaatcctttttataagaaaggtagtattttttttccttaattataaaaaacatttttaatttttgacaaaattataaaaaaaaacatataatcactttaaaatgtattaatgagtaattttcttttatatccttgattcattgtgaaatgaagatcactttttttattataaatagtgttattatatctaactaattcttaaataagttaattttatgagtattttttttcaaaaatcttgatatgaattaaaattatctaatttaactacttatattgatcttgataaattggataattatttctagtatataaataaacttggtatttgtttatatatacagagaatcgaaagtaatataatcggaaattgtgttaagtattataaatattttgaatatgttattattttaatgaattaaaaccaagcattagacacctagtcaaattaaacatcgaatctattttgacatgaaatatcaaactaattaagcacaagatcaaacttgacatcaaacaccaagccaaccaaatattaaggattcgtttggtaagagagtaaacgagaaaaaagaaaatatgactaacgaaatattttcttatgtttgtttagatagaaaatgaaaggaaaaattattttttaataaaaaatttaaaaattttcttcttttcattttctttccaattcaaattttaaaattttccttccttccttatttttcttccatctaaccaaatataagataagtcaaacttaacattgaatatttaactaaagtaagcatcgagccaaacttgacactaaacaccttgtcaaactaagcaccagatcaaactagatattgagcacctaatcaaactaagcatcagactaaatagacacctagccaaactaaggaccaaaccaaatttaatattgaacacctagccaaactaagtattggactacacttacaccaaacatcgagccaaactaagcatcggatcgcacttgacaccaaacccgatgaaaagatttaatagttaataaaatttaaaatgaaattataacaaaaaaaagtattactgattataatttaattttgatatgttgtcaatatttttttttatagtgttattgttatattaataacaaaatttgatttttacatttaattatttgaaagttacatgtttctaatttgactgcagaatgtataaagcatgttacgtaacgtcaaaattaaattgtactgtattacacatgcttatagttgtgtaaacatatacgataaatataaaatagttttaaatatgagggaaaaagccattacatttttttaaaataaaatcgtatatgtttatatagttgttttagactgtacatctagaattcgacccttcaaatattatgatgttttattttcatttttgttaccaaattgatttctagtatttggaaacactttatttgagagaaaaaataaattcgaaagttttaccaagatgtaaaaaattctttaaaacatcttaatttaacatgtattaagatcatgatactaatcctttatttctttgttgtcaaattcatttcataaaaatttaaaataatcactaaatttggtgttattaatttaaccatttgaaaaaaaagaataaagtgatattttaaatttctaagtaatttgatagtaattttttttaagcaataatattataattttgtaaaagtctaatttagtaaaaacgaattgagaattaatgtgatgactacctattcgttagaagatgacctagtttaacaaaggtaaaattagataatgtttacatatacctttttcttccttcaatgttcaaatacagtaagttcaacaaaatctttaatacaaacaagggtaggaaaaagtgcacagattctttttcaaacttattcaaagaaaacagaaggaaaacgcggtaacaaataaacaatgatcgatcttcagctcatcataaaacaatggttctttgagcaaccatacatataacctaggaacgagctttcgaattgaaatccgtgatgaaagcctccatccacataaactcttagattaaccaagaaagaattagaaaacattgatagtgacatgataaagagaaatattaaggaacaatacatgctattcaaaagctaagattaactagcgtaatgaaacaagaaaagactaaaaatgacttctttttgagctttgtcaactcaagtagcaaaacaaaagcaaagaaaatctaaaacatgcttttgagttcaccataacactgacctgatctaggtcttttcataattattcatctatttaaatttccaccacccaaacagagctcccagcttggttttaatgtttctctttttattcagacctccacactagaatgctgcttcattgatcagatcaaatttcaaatacatgtgtgcggtcagcacttagggtgttacgagcaagttggaagaaatccggatcttgaaatctacaagtctctctctggcaagcataataaattagaattcagtagctgatacaaaattgtcaaccaaccatgttgtttgttaaaaacatatatacgaataagaaaaggccgtgagatgcatttaattagaaaatcacaatcaatttcaagaagcttagaaaagaaatgaatgggggttgagatgagaagaaagaagtaataatgaatttataaggtagaccttgtgaaatcataaggctagttaaaaaaagtagcaataataaagaagattagaaaaggccttggttgtcgtatgaatatcggttggagaaaagtgaagaattgggcaaaatcatatagcattaggaagaacagaagcaagtaaaagtataaaacaagcggtagagaagtgaagcgtaccatagagatagagaagagaaggttcaatttggaatgcgtctagcaccaaggcgatcaagctgcttgacatatgcagaagccttcaaattgccttcatggagaaaagcgtcaatcatgtgtttggcaatgaggtgtccaatttgctcgtcgtcaatgacggcgacggcggtagggccggcgccgctgatggtacagccaaaagcaccggcctgaatggcagccctcttgacagcctccatgccaggaatcaagggggcacgccttggctcaacgatcttgtcagaggacaatgccttccccaacccaaccacgtcgccctgcagcaccgacgccaccagagcacctgcctggctgcagttccacacgtggtgcggcatcccgatctccgtaggcagcgctgcccgcatcttcttcgtcggggcctcgaactcaggcgtcaccagcacgaaatacagctctttctccgccggaaacatcaaaggcatcaactccagcggcgagtagctaccgatcagcacaaaaccccccattatcgacggcgccacgttgtccgcgtgataccccgacaccttctcttccgatttcagtgatgccagaaccagctcctccacgcctaatttcttcccaaacagctcgttcaccgccacggcggccgcagcggcgctggcggcgctggatcccagtccgcttcccaaaggcaggcccttctccagggagagggagaggccgacggatcgaatggagagcattttcatgacttcaatggcggcgatgccggcgcagttccagagagggtttttgctgagcttgttgggggcgtggccgctgatgtcggatatgcatatctcgccagggtgaacctgtgggtccaccttcaccgacacaatgtctccgagtccgtccacggcgcagcctaggaagtcgaatcccggacccagattcgccaccgtggcgggagcaaacgctttcaccaatgtggttacaggttcgggctcccttcgaatattgactgacacgttgctgctgcagcatctgattctgaatctggccctgcctttcaaactcgccgtagacggacacaggaagcacgtcgtcgacgtcgccatctccactcttgcgggtttgtctcttccaaattataatcctaccaactacgattcaagtaatgtatttcaattaaatttaaaatttccttttttactttgtgtctttgtttgggtcattcccatgcccaaccaaaacaaaaattgttggtactttaattgggagtccatagttttgctgaaactttctaaaattaatttagaatttttaagaaatatgacgaaggttttattttaaaattaagttagtaacataatttaattttttttactcaacttaaaaattattttaaataagtattaattctaaaaccaaaatcaattttttaatctaaaatcagttaataagaattttaaggtaattttgaatgatataagatagatccaattacttttttttctttcaaaaactaatttttatctgcccatttttttaaaacaaaaacttaagatgatattaattgttattattttattaattatactcttaccattatctattttttaatatttattttatccatttattataaaataattcaatttatcgattcaattaatatgttacattatcattctaattagtattgacaaatacatcacatttttcgattaacatatttaaaacaaaaaaaaaaattgattaaaatgaaacatttcaaaaacataaaaaataaaaataaaacttttaaaattttatgtaacaaaactaaaaatattaaaacataaataatcaaaagtatcatttagcttttattcattgaaaaaatattgctatagtatgtaaccgctaaaatcaagttgtgtaaatatgcatgattaaacgaacacgtttaactataaatgtttcacactagcttgaacctagatgcaagtaaataatctgtaatattactaattaattatgagtgcttatatatcttcaccagaagcaagcagaagttttggcttcaacattaggtgagtgaggtcactaaaaatgtctggatgcgtgctgaacggagctgcaatgattagaaataccaactttttgaggggttttcttattgaattgccgtaccattgatgaaaaaaatagacaagaagcgccaggaaacatgttattccacagattagaaacaggccccagaagctctttaattgaagttgttaatcctcagtactgtgaaaaccacaagccttttctgaaagccacttttcatggatcctttgaagttctccattctcagatagggttagaatcgcagttgacatatcaattgcaagaggagtctctcgggaatgcctgccgtgacacctaagaaattaatcaaagacaagtagtaacataaagatttacaagtacatgaattgcagttgagaatcatctaggatcgagtagtactgaacttgagcaaaatttgtgctcaactaccatcaacatatatagtgttcattgtttcattcaaagaagctaaagggaagcgaagttgtgatttattgcctcccattttataaaatatcataccttctaacatcatgttttgctttctgcattagtagttagtgcaacaaagtacataaaaaaccacaccctgagaaaagtaccagtaagtaattttaaaaaatactcacaaatccccatccacttttggtgaactcctggccccttattgagaattggcagtggtttgaaaggaaaagttctacataggatcgttcatccactacagctgcaacagttccgctttcaagggcgacagcatattcttctggtgagcgaagaggaacaagtctatgtttagggatgttgagttgctcagtgagatagtttgcagcaaatgagcctacttggaaccctatacgttcactgctggatatcaagctatcaattcctgttattggtgaggacagctgttgcacagtgagaattgatgtcaagcttgcagtgtagcttgaattgattatcagaaccacaaaaggccagattatcaacacaacactaccaagtggactaactgtgttttctcctgaaacaataataaagaagcttatctgtttctagccacaaacatgaataggacatgaactgtcaaaatgggtggacaacttactgtgcgcaaagaacatggttgagaaactaaacctgcaacagcatacaaagatgagttatgaccagactagatatgtgcacaagctacaagagtacttaccaaagaactgtaactatctgttccctcggtgacccccgaaactcattgtttgttctatgttcaagaatccacaccactgctccaacaaaaaggaaaaaaaatgcagtgacacactgacaccacacatctgtggagtaaatggttgtaacatcccgggcgctgacgagcgcggggagtgatcgccggtgcagtgaggcacggacaaggagcggctcctggcaggtaccagcgggaggggtacatgaatgaatcaaatacacacccaaacgagagggatccagaggctgtgcaggtatgggactgtacagttgaggataacttaaaggatttaataggtactacctataccaacaaggtgcatctacttttcggtagcccataacataagaacttcacagttaagcgtgcttgacttggagtaattatgggattggtgacctcctgggaagtttctcaggaagtgtgtgagtgaggacaaagcacactgaaaagtcttgtgttggtatgtagggacgcaagtggccgggcgttacaagtggtatcagagcaaggcctctctaccagtacggtgtggttcgaggacgaaccaggcggaagctggtgggcatgtaacatcccgggcgctgacgagcgcggggagtgatcgccggtgcagtgaggcacggacaaggagcggctcctggcaggtaccagcgggaggggtacatgaatgaatcgaatatacacccgaacgagagggatccagaggctgtgcaggtatgggactgtacagttgaggataacttaaaggatttaataggtactacctataccaacaaggtgcatctacttttcggtagcccataacataagaacttcacagttaagcgtgcttgacttggagcaattatgggatgggtgacctcctgggaagtttcttaggaagtgtgtgagtgaggacaaagcatactgaaaagtcttgtgttggtatgtagggacagtcgttgatcctgcaagtggcagggcgttacaatggtcgcaagatgcaagtgcaaaaaaatcgatatataaaagcaagatattactacattatgtttgttctctgcagtgagcattacttacatcagaagtaatcatgttgataagatcgtagtagcttgggttcttgtgtccatctccaaacagaatgaactgttattgaactgcaaagggaagcaatttaacggcagctaggaatatatctatatgcaatatccttgaactgcattggtgccatttatttgcgagaccgtgtcttgatagctaactctgttgagaactccaattctcagttgcctcccattatttgggaaaacccatccacgaggcttttctgttgtatttcctggccatatgacaaggtttagatgctggcttgaaattgaacgattggcaggctctgcgtgaagtttctcaggggttattatagagaggccagagtaattagaccagtagccgatactcctataacctgtagcaattacattaaggatgtcatatgatggatttagaggagatctatctgaaccaaattgaataggtccagtcaatccagtcatattaatgcgcaatatgttatcaagtaactgcttccctccatcaaaaacgctcaaagcaccgaaatccagagcctcttccctcgtaccacttaagtttgtattgttagagaaggaaatggtaccattccgatcaaaaaaaaaaaaaattgagtaccttagcagtcatccaaacagaatcatatgcatagaggccgtatggatttaacccaattgagccattactgatgtgtttccaccttgagataaatgcctgtttttttctggattgaggggtgtgagggcaaaaggtaataactccttgaattgagttacaagtatctgaaggtagtgaagtagttgagtctaaaatagttgataaccaagcagtagctatccagacataccctttggtcatcattcctagcttttgagccacctcaaaaaccaacagaccagtttgcgcgaaggtgtttaagacgataacccgagactccatactcttgatcttcactaactgaccagtaacaggggatggagtggcagtcggatcaggaggcagtgctgctttgtaagacaacttacagcgtctctcagcaagtttatccccaaaacggttatcccattccgactctgatcatcgtcgctgaaccctgctatgacttctctccaaccaaaatagctaatgaggtcggcaacggcattcatgtggaagtgatcggtgggtgctgtttggagaaaataaggatactggagaggtgttagggtggggtccagagccgtggagaagagtaggggaacatggagctcatttgcgagatgcgaaagcacatgggccattactgaagattgtggaccaattatagctactgagtcggtcatcaagaacttgagggctggaagaattaggaagtaaatgaatatatataaaataaaacaagcaagcaggagcaggaagtgatacatatacatacccccaataaagccaagaaaaccactgaagttggaagcatggatggttatggacaatttacgtcccaccaggatgccaggatcggaattcacatctttctcagcagcttcgatggcaattttggaaactcgtccgtttatagttttaaaagtgaatatggcaccgattttgacgacatcatcatgtcctcttgatgctccatgtaataggatcaatgttaataatgcaacgcatagcaaattcatccagaaactatgattcataattatatatgtaatgtagaggaggtcgagagagaggctactactgctgctgtttgatttgaatgggaagtatagacagacaatatgaaggaatgtagagtgagtggtgaagagatagtgatagctttaactgtagcgggaggcaatgaaagcagaaaccccacgtcacgcgggtagagggccacgtccaacacagtaagtgggacggtgtctgagtgagcacagcaagggccattttgactgacatgaatgcaagcagattgtgacgtttcatttatcgtacttaatttcaacgtttcaagtttgtacaagaatatatctgtgtccttgctatctcgacagctttcacactttatgatgccaagaggaatttatattttctttttggaagtttatacatctttccctctgaatgcatgtatgttttggtttttcaagtgagtttgggtacaagtttccaactctttgatcctaacccagaaactttctatttaaagactaagttaggtaataatttatgaggggattacacatgtacaccaattataaaatatgattaacctaccaaacgtcatattactgttaccaacttcatcttttgctcaaggactcccaattaagcaatatccactatgaagtaattcaaatggcataacttagacgccaacaaccttggtgttttgtttgagtttttagcttcttcatattcatgcatgtaggttaaaatatgattttggtcctaatatttaagtctcttattttataaaatggaggattttgatcccataagtctcaactgacgttgacgattaaataaaaaatgctgaccattaatttgttaacgtgacactataatattaaacttttaattaatgttttgatcacgacaaaatttaatttaataaaacttaattaaaaactaaaatatataaacaatttttatttgttcagtttttttattatcttaattaattaactaaaaactatacacctttaaataaaaaataggcatgtcaccgcagtcaacgctaaacatatcagtcaatggcctgaattgatagttgaggccaaaattctcaacgtagtaaaagagagagactaaatatttttattttttataaaatataaagaattaaaattgtgaattgaataaaattagaggaataacttacatctataatttgagactgcagcctccatcccattttggttccaggcttgaaaatttggactagtcttataaatgctaattattgaacctctaacaatttctttgtttgcacattattatatttcttgttttcttttaatttttgtagattcaaccatactctactttactcgaattatttttcaaaataaagagtaggtttaaatttgtttaaatttcttaatgactaagcaaacaataaatttatagatgatgacaatttagtttactgcatttccttttaattttaaaatcctccacccaaatacaacataatttgatcagtaatctctccaataagaacttactacaaaatcagaaccaaccccagagttctgacgaaattagattgaagaggaatgctattaatttcagtcactaataattacgtgaaataagttcagttaataatgaaaattgtgttaaaaagtatattgtttacatttcactaaatttaattggacaaattaggttcaagttatacttcaccacatatatgacaaagaatcataataaaattccgctcagtaaacaacactcaaatcagatagtcatcaataccacaatctcttctacgggactatggaaaattaacaaccaacaaacaaaaaatatagacaggccttcactttcattttaagaagggaagtaagattgctggactggggacaaacctgcgcccttccctaaagaaaaagtgaggaacaaggaatacacaagattaaatacaagaaatacattacacataacaggttccagatagcaagacagacaacccactccaccagaggcaacagtcggaaagtctgaaaacagaaagaaataatgcatcgggtggaattcctaaactaaaaagcactccaattatcagatcctcgtcttggagtttcattatcagatgaagtcctaaacgggccagagccaaagggatccgagtcatcaaaagctggaaacccatgagcatggtcaaaatccacactgttgcgtactgaatcatattgttctgtcttctcccgagcaggcaaagatacactatcatgtgttctgaaggaatcaaatcttgagaagtcaaaagcagtttccaaccactcttttggcctttgcggagagctacctgagctgtaaagtggtgtgcttggaacagaatcatcaaaactgaatccactgctcctctggaagacatcaccagcctgtggtgaacctgttttgatggggtttaagtccagttccccagaatcaaagaaatagttgttcccagctctatcaagatctctctccttttaaaaaaaaaaaaatccggaaagtaatgagtagattgctagagtataaatatccattgatcaaacacgtacaagcaactcaaaatgttaaatttaagaaatatattaccaagtacattaacagaaggtgagggttcagtatttttagtcaatcttcaaatatattcaattatatatctttgggctggcagatctagcacattcagattacattatgctttctcctctgatcccatcaatcctttgcaaactggcttccatacttttttgcaaagaatgacacatctatccctttgattttaagacacaatcataaaatcttataaaagctctgaattcctactaactaaatcatcatgtcttcatattccatcacaagtatcacgtaatgtaaccatttagatctccttaacatccaagtcatattctgaacaaccacatggaggccaactaatgcttggttcgattgaaatctataaaaggaaacaaaagaccagcacaatcttcatttatctggaaaaatcctatgatagggtaccacaagaagtccaatgtaaaactctagtgataaggagtttgtattttatataataaaattgtaaaggatatgaaatggagttatcaaaaaaagatttccttacaaaataggtttgcaccaaggtcaatttagagtccaactttttatcttaggcaataaatagcgagtgaactaatagagttgtaatataactgtagtcttgcaccaagggtcaacttttcgtgcctctatcatggtattgcacatgcttattaggcacaaccaagagtcaatgtctcaattatggtaattaggcaattgctgcatataaatatccttaattatggtaattatgtaattctatgagttacataattatggaaattaggtaattattttctctttaattaaattattaaacccatagaccataatatataataatacaccccgctgtgtacactaacacatggattcaattatgtatcttactttttcttcttctcaacatcaataaacactttctacaaattatatatatgggtctgtttgtttaagctcattttttaagaaagcacttttttaataaaataagcagttttcttcttttctgatgtgtttgtctaagctactttttcttaaaataagcagtgttctgttttttttaagaagcaaatcctatctacttcttaagaagcgctttcttataaattgttttttcaagtttaaacaaaagggtctgataaaaaaaagtttaaacaaaatggcccatagtcctagttgacgagtgaagaaaagaaagaaatatagtaaacttgaattgtggaggaagactaccaaatgaaacatgatcaaggttttgtctcaaaattctgttttgaatgggcctatcttaactgcaaaagctagctcttgaaattaccattgttcaagcccttgttctactatggttgtatctatagtcgatatcggatctcaacaaatttgaggtttattcagtttaaagtttcacaataatgtgttatagataaattagaagaaatttagtgtatttgagcctttctctatatgcttttgtcaataatatcttgattctttccaaatatgcatacctcaaatgatgatttgtattaccacattgactgttctcaatagtgacaatttcctagtatgcatctttccagtaatattttccttcataggctatgtaacatcttgactatcttccagatgagcatcattctaacaatctaatcactatgttgtctctattaatgctcttttttggtcaaatgtatttaagtcattgtttgggaaccctaataacattgtgtgctttggtgagcctatcaaagtttcaagatgccgacatactaatcttcaactagggggagtgttagaatattaggaatatcattattgtgtaaagagtcttgtcatgttacttatacaacatttgttacttacttgaatattagcattcattgctgtattagaatatagtgttgggttagtgttttcaaaatattacatctcaattcagttagttacatatactccatatttcaacaaccaccagtggtcatgacaagaaagaatagtgcaggagaaatttaaacacacacacaaacacctatatatatataactggcaaacacgtgttttgaaataaaaaataatttggccaagacattaaggtgtgagaattggcatacctctttagtgaagctactagcattgaatccccaaactgaatcaatatcatcatttgtgtcaaaggttccccaatttggttcatcaaaaattttgtctccagaaaacgcagatttgacaccaccatgatcactacatatgcaagattatatgtaaattattttgcatcatcaaaagatccatactatgtgaaaatatgaaacaaaatatacattggtatctattaacactcatgtatgtcaaaatcaatttcaaaccaaatttgggaattaaagtccgtatcatgcactagaaatgttcataggacgggttgaaacaggtttagtttgatccctaaaaaaaaaaaaaaactacataccccattgctcggaggctccacgctatgcgcaggtaagggggagggaaattgtacgcaaccttacccttgcatatgcaaagaggctgtttcgggattcgaacctatgaccaacaagtcaccaagacacaactttagcttcatccttacctagttaaaaattttaatagggtcatttgatagaacctgaacctgaatgtgtgtatgctgatgatagtatcaccattcaactatgacttgtataaaaaaatatgatagtccaaaatctataaagtgatgatatacaacaatttgtgactctgttaaacacatcatatgagagatgacagttatgaatgactcttgaaaacttgctaaccgtgggtctctatcacacactcacataaaatccctttgagttgaagcatggaaatgcacaggctcatttttccttgtgctaaagttataatatgattgaaaaaaatggggcagcacaaatcaaacttttatccaaacagtaagaggctgtaaaaccatgtcaaggacaaatcttctagaagaataagttgttgggtgtagaccaaggagtctttaacgataatgccaccgtatttgtcaacatcaacatcaacatcaacagcacctttaacccaaattaattggggtctgtggtagatgaacccaatgatagattggaaaaaaagacaaagaaagagaaagggaaatgggaagaaaaaaggaaaataagacaaaagaaaggaaaaataagctaaaatagaagaaggatgaaaggaggaggggagaaatgaagaggaaaagaactaaaaactaaaaaaaaaggaacgactggaacatatacatactaatgggtttaaccctccaccaagcttatagcttttatccactccatcctaagacacatcgtccgccaatctatatcccactctattaggtcttgtttaattacctttccctgggtgagtttcggtcgacctctacctctctttgtgtcgacttcttggtaacaaacttttgttctaatgcgagcatccagtggaggagtacaacatatttgtacaacaataataataatagataagggatcgagttactataggaggagtaactctttgtaaagttactcccttcaataactctatatatcaaattttattaatccaattgttaaattaaaagttcttatttagtacatcaagtctacaattttttataaaattataaaactatttgatacttcgttaaataaatttaatttaaaatataaaatatttttgtaaaaatataagtaaatgttgagtataagattacataactacaaatatctgatttatataaaacttgatgtgtgtggtcattgaatcaatatctaaatattcaatggtaggaataataaaaattcatataaacaaaaagttatttaagacactaacaaaaacaacaacaacaatattgatgatcatattattattattaaaaataccatgaccttccaaaggcataaagaatattaatggtcagcaaaataagaggacgcctactaaatatatgatcaaatgagcaattggccagcatttgggaaactggtgaataaatcttaaaaaccatacctttgggtttcttgtatggtatcttgatcacggagtaagctatcttcaccagctgtctttctaatgtcagaatcaaaatccccatgcgggcttccgatagcactgcttgcaaatggactattgggagcactttttacagacccatcatcacttttattataaacaaatccattgccaactccctgttcattggtagtctggggcttttctgacttatcatcactcttgggagaagcagcaaatgtaggactgtcagtgctcacagcttccgcgttcacagctttcgtgttcacagctgacggcaacttttgctttggaggcgctataatgttttgcacgtcgagagtgagttctttgacaaaaacaaattctgcaagaatagtgaataacaaaatttatttagtcctttccatgataatccaaacaagaacagatgcaggtcagaaaataaacaagtatcagttaaccgttatttcaattcaatcaatatcttataatatctcttaaatatacacctatttttggaatgcattgtctcctgaactacataactgttcaaaattgatcccttgcatttagatgaacagctacacttagaaaataatgacacaacaaagtacagctaagtaaagttcatcagcaaacaaagtacttagtgtaaaagaaatatagatataagagaggtataggcaagcagagaaagtgatagaaactaaggtctgtgagtgcatagaagagagaaagcgatagaaactaaggtctgtgagtgcatagaagagaataatttacaaatagaaaaaagactggccagattctattgggtcttttgatgctgcaaccaattgtaaaacttatgagtaccaaatttcattatccctcacccattaattatttacttgccacaaaggttgcagatcagtttgcttagtcttctgatattataattttctttcagctattaaaaatgtctgtcatgagtaggcatgccttaagattcagctcttacctcaatgttgcaatttcttctctgatctgaagagatattgtctgcatttatttccttaattattatctctatattctttattttttgtatttgtggacttatcatcaattaggttgaataggttcataaaaaataggaaaaattgcaattttggtccccctttaattcttgatctgtgattttggtccccacattttagaatatccataattttagtccaatcctcaactttacatacattttatttcttttattttggcccaaaataaaccctagatctaacatattaacttaaggtactatcaagtatcaagaaataatttgattaattaaaattaaaaaataaaataaataaatgtatgcaaaattgaggattggaccaaagttgcggattttctaaaatgtggtgactaaaatcgtggaaaaaaattgggggtccaaaatcacggatcataaattaaaggggaccaatattgcaatttagcataaaaatattacataatttggtaaatttgtttatataaccctctatttcctttccctagttcattgccttccctttcctcccaactttcgaaacatatctgatgtgattactaggactaaaagtgcaaataaccaaggaagaacagtaaaaaaatgataatgcattaaatcataatgtatcacatatacatgctgtcaattttattaatgcggaagaaaatacagatggaaggatgaaaaacactaagcaaaacaagaaacaagtaatacagactttaatacttcacaaacaagttttctttttgagatcaaccccttaaattataagaatgacaaaaaaatatccttatcaaaatgcaaatgaaatccaattgagtttgatgatacagaaggtaggcagataggcatccaataagagcgtataaaataaaaatgtggtttcataaccttgtgcaaaaattcctcgtaattaatgatggatgccacataattggcacagcatttttatttttattcaattaacagattatcatatctagttagggttattttggatacctttatcttcaagcttatcccaatcttcatcccagtcagcagctccttcttggataccaggttgccagccttacaggataaaatggagtgaggctacagaatacaacaaactcgatatgcacataattattgcattattcaatataatatatactaaggggagcacatggggtttgtgggcagagcaccacaaagcaaagagaaatgatgggacccgactaaaatgagcaaaacaagaatacatgataattatatccaaaagctaacaatgcacttagcaagtaagtgaacaaaaaggaagcaagttcatttaacaaaaatgaagagacaatttgtaggctataaaaagttttctgagcttctttaggagtatacttacccggtgtaactcttccttttcttttagtcatgttgtgagtctaactatagttggtagttagactgctattagttagacagttagttaggacagctgtttgacagctgtcactaactaactcaagttagttgacagttacataactataacttttgttttcttttgccatcaagtgggtttctctagcttgatctttggcaccttaattcaggttttatcatgtattaggttgccaaagctttgttaggcttactgatggccttttctttctttttcagtacttcttgtacttcttttcatatatataatatattatctttgctgataaaaaaaaaatataaactgtattgttctcagtttctgtttgggttgaatacaatattctttcacctcaatttagttctctctcagttttactttcagattcatttagcttcattaaaatcatgatagataaatgcaatcatacagatacagaaagccaacaactaaagttttttgtcagagcaatataaataaataagcattacttaatagaacaccaccaatatcaattaaatcaaatgtattgaagatggaaatgcatagcatttcttgcatactgttctcagaaacatcagagagtttcaagtttcccttcttttcataaaatcaatgcattaacccaacatttgatagcaagtacagtagcaactactacaaagaaccatataattatataagcatcaatacaaagcatcatcatatttcttagaatgtgggtttggccctaactcaaccccaaaagctagctcatagggtgagggttgttccccacttatatactctatcttgatgctatctctagccgatgtgggacttgggttttccccaatacatcccctcacgcccagcacttttgggcttggtacgtggataatatggtgggtagcccgttaatggatctaagataagctctgatgccatctaagaatgtgggtttggacctaactcaaccccaaaagctagctcatagggtgagggttgttccccacttatatactctatcttgacactatctctagctgatgtgggacttgggttttccccaataatattgtatagtaaattgattccctaaaaaaattgcacaagagaaaacattcatgataaggagcatttcctaaactttatatattaaatgccacttgattaggttatacagtttattctgattttatgtaacctttaactgattgtttacaaagcatcatcatatggtattttatagagcttgtcaaacagagctttgcaacaaaatcagttaaaaattacataaaatcagaataaactgtatatatttaatgccacttgattaagcaacctgtatcaaatttcactggcagaaataattttactgctgattcaaaactagtaattcagcaactgaaggccagttcctcaaattacaaaacaaagctgatatctaaaacaaatgcactaaataccatataacgaaatcaaagacacgaaaaagatttgagaaggactggaagtatataacaacaccaattataaatttgaatttaccaaagggtagctccaataatgtagtgggtttagcacgtaatccatatttcttgcatcgctcattcagagatttcaccagctcatcaaggtctgtttgaatacgatcaacatgagcctgaaaatttcagatgactaaatgagatacataagttgatcacaatttctcaacatggatgcacaaacctggtaatattaaaatgtacctgcagagttgcatcaccttttccatcctgttccatcttgacaattgcttggtacaattcaatttttttctcctacacaaaaaaaaaaaataaaaaaaaatcatttgacagcaatgaagcaaaacaggtaaaaaaaaaataacaaactttttagcatatatgcttataagctatcaattgaagataaagccatatttcattgcacctgtatgtcacgaaacgtggcttcctcagtagttaacttggatgataaatctcctacttgcttatatttatcttcatatttctttgctaaaatgtcaacctgaaattcatatattgagcaaataataaatattatgattattgaggtaataaaaacacatgcaattctaaagaaagatacctcatgcttatcagcagctatcctttctatgacctcattaagacgattgtcacatctgcttttgtacagaaccttttattggcaaaagaacaagtaatttgtttaaaaaaggtgaaaagaaaaagaaacgatgaatattaagtattaacctgacactgacactattaaccatacgaacaaaatggaagatagcttttatatgctttactcttctaggtatccacaatttcatagtacaaaagggttacaaaagaacatgtctgtttcataggcttttttttttccagtagttcctaggtatctgcagaagcagacaaaagctgaaagaaaagggatagcatctattaatgcataacaattaagtaaaagacctttccaagagaccctttttcacttccttaaaattaataggacaggaaacccaagaggcagacaggtgatatgtaattatgttcagcagatctatagtaaaaaatgattagtttggttaacaaatctggatattgacaataagaacaaagccatgggatgtaggaatatgttcttatatatacttaaaacaatctgcatatattttgcacccttaaagctttgacagtaaaatctctttgtaagaatgtaagatgcattcttcctaaagtacaataaatcatgatggtgaacaattttttgaccaaaatacatttcacaattactactactagctacatcagtacatctatatggtatatagctcatcctgcaaatcaagatacagtataaatgtacacaaatcaaatgttaatctgttaagcatattctaaaataaatctaaagcttggacagctaggcaaggcgaaccctgtacagtaaaagtttcagctattattgatccagttgccacctcttcaccatgtttggatgacataaaagagactaaaacagtacaaaaagaactcagataaaccagactagagttttaaacctcttttatttaagcttcttttatttttttgaagaaaaagtgctttttaattaaaatggcatcttaaaagaatttacaatgattatattattgtaaattttcaaaaaagaaaaacttcaaaaatgctgctctagtggttttctcagaagcaaaaaagagtaacttctgaaagaaagctctaaaacaatgcatcacagaaccactttttctatacacaggccttaataaaatacaaaggaagtaagcaaggaaaacactcacaagttcctgcatttttgcacggtaaaattctattttctctctggactccttaatttccttctcaagttcttccacctgcatttaacaaagaaaatgaagagatgagaattgactatgttcaattgaaccacaagaattttatcaagcatacatggaccgcaataatgatatgcttcatgcaaatgacaatctacaatatgatctttccacgctatcttcaaagataccagtaacagctaataatttttgtagctgtaagtttcaatcatcagccaaaaagagtaagcatgcttcatgactgaaaccaaaaataacttaatgtcatcacaccacatcctcaaattaattgacctgaaaagattatcatagaggacacattccccatatttgtgatcgcaaagaacctactaagctgaaaggtaacttttatcttattcctatattactgaatatactctatctagagtagtgaatgttgaactttaaagggacaataaaagaaaaaagtgagagtaaaagaaatgataatattaaaggatgtgaccacagaaaaaagaacagaatatggaatgattgtatatgagattatgaggagatattaatgtaacatttatcaaggaaaaaatgacagaaaatttgttaaggtggtttagacatgtaaagaaagtcgctgaaggcaccagtgaagagagtagatcgcatgacttttagccctataaaaagtgcaacagcagaaatgattcaaaaaataaataaaagcaccttcttatcagcttctgttgcttcttgaaactttgaattaattgaattttgctcatctgaactcagctgattaatgaggtgcctctccaagactggaattctagatttctgcggcttgttctgaggtccttcatccgactgagagacagcagccggccttggtggccgacctgcagcagggttcacttgtcgagcaccagaaccagttgtccctggttgttgttgaaaagcttcaaaagataaaagggggcagagacacaaaaataagagaaaaatataaatttatcatttatctgaagggttatatcagtaataatctacaatagtggtattgtagtagtagtagtagtaaaataaaacctgctaattcttgggcacacacctgatggatttccccaactactatagtgagcagcaggttgaccagtagttggtaaatcaagcacaatgttacttggaagtacagctggaagaacgcatccttccctgtgtcgctccattaggtacaatgcaatacaaaactccctgagagaaagcatgctatcattatcttgatccgataagtcccagacctgctttaaaacctctgaaaaatataaaacatggcataaacataatgttcaagaaattagctagccatgaaaagtaatacacatggaggatgtgaaaactaaatagaaccccccaccccaaacagacacaaaaaactgctatcaaatccaacttagttcggaaatatgtttaattaatcatatttgagttgatttcctaatgcatgtagagctagaacactagagaagtagaaaaatatatatagcgttttaagccaactgtccaaacaaaaaggcaaggaagtagaagaaaaatacctcttggtaatctccaactaagaaacaagttccgcgcttgttccccagtgattttaccatctctatctgtgtctacttccatgaatactttcatatatttctggacatcagtttgagtcatccttggccatggagcttgggattgactggaagcagaatcctgtaatctccctggaagtccagatgaattcggcatattatgcgtctggagtgaggcatgctggtcctgttttaccaccagctgggcttgctgaagctttgcaccaacaggctgggttgcaagtgagcgctgcaaagaatcaggagtactagtcctagtagaatgctggtttcctccagatacaggaacaatagctgaagaaagcgctgaagtgccagaagaaaatccttgtggagaagaagcttgcttgggctgaaatgagctagctgagaataaatctcctccaaaaaatgaatcggaagaattaccgttaacagaagtatccactggtttagaatccttaaccaattgatctgatgactttatgggggaggcaggatattggccaggtggccgtgccacatttgatccaaacccaaacccctcctgcgttgatgggggactagttcctctaactgctactggagagaaagttacttctggagttccacccatcttgccataactggaaatgccgggggtttcagggcgagccattccttgagtggcaacagcagctggaggcctcgcaaactgatttccctgagaagggagggtttgctggttaccactcaaatttgaaactgccccccttggtccaagattttggtgggataaaggactaacaggaccaatctgtggcgcaggtccaggtgcaggtgcaggcgcaggcgcaggtgcaggtggagatactgtggcactgaaattaatctgaggagcaggaatcttagatgcagccgggccatacaatgctgcttttaccatttcgggagttagttcccgcttactctgtgccacagtaacaagcttaagggcattgtaaaactctgcccgcccaaggaaaccactctggctttggtttgcaaatgcccaaatctgcagacacacagacaggtcggtgtgatttctcaagtatttagcatttagacgaacagatttctaatgcagtgactaactaattcaaaaaaaacaatgctctgaaatgcttggtggcacttgatgtgaagtaaatcaaataataagcagaatttgaattagaatagagggagagagacctgcgcaagaacatgtttgggcaaaccggagccctggaagaaggagacggcttcggcaccgctgatacggccgtctcgatccaaatctgcacggcgaaaataggcatcgaagagatcgacattaggcgctgccgatgccattgcagaattcaacagcaccgcctgatttcaatagattccacacttttttagttctcctttgccttttcagatcacaccatgtatttaattgtgattcataaaagctcaacaaacatcaaatttcgtaccccaaagattgattaaccgcttgatttgcactttgcttgcctccaatcgaatccgatcaacacactcacccaccaacaaaattacagatcatccctcgattctcatttttcgcccaacggacaattttaatgctctttactgtctgaatttcaaaaataccacccctcgtcacatttttggggagaccctcgccaactgcgactatttctaagtttttttttttatgtaattaaagtttatatttataataatacataaaaaaatataaattatattttaatttttattcatgattttaggtcattttttattatcaaaaataagtattttattttgtattggatcatcctgtttgacttatcctagaaaccaatttgctcacttaagtatttatggtcgctcaatacttggaaaattttggatcatcttaactaactcgttattgagtttatcttaatcacggacttgtgtcctaggtcatgagagaaaaaaataacattatcataatcactttatttctcaaccaatttagatactccaaaaagttagtcttgtatttatattagatacttaaattgttgaaacatgatgacataatcacgaaagtgtatgtcttgatatgtaagacatacacaactacatctggtacatggggggacaagaccgagcccatgccagagagtgaggatgaaagatttgtgagagtctcctacgagtcgtccgacggaaaagactttatgaatggagtaaaagaacttgggatcgtcgatcttttccttaaagattgggatgagtcgatgtcgatcgatggtgtgaaaacctcaaatccaaatatatccttttttggatattgtaagtcactcttcattctagaaatcaattttcaaaaacactcttcatgatacccttttcaaagcaccctgctatcatccaaaaagtttttgttagcaaatgtcatttagtcacttttgatatgtatcttcaattatagctatattaggattttgaatgtggaggatagtggaacgaaacatggtgaattggaaaacaattacaattgaaaatggagtttattagtaaaaatgagaaggtgtgaatatcatttctcttgttatattttcttagactatcggggtcgaaaacctttagcatgttttcttcatttatttctcggccttttctttttaggtcattttttcccccaacacagcccccttttttcaattttcaaaatatcaaaattatccttccctttttttgaaataaaaaatcacgcctcttctctcatctcacataccttgtcaattaaaaatgaaaaaaaaaattataaataacctaacaattttgaatttcgtaatatctcaaaatttataaaatgctcttttctaaatagttgataaatctaaaaatgaattttgattttaatgcatacgaaaattcataaaatttattttaaatttcaatcattgacaaaaatatcagaacatataaatgtaaaaaacttaaatcagaacataaaggatagagaaaaatattttttatttgttaaattattcaattttaaattactacaatacacttaaaattaattagttagaataactaaaagagtgattttttgtcctaatttttgttgtagcatgttaatacacaccaactcaaaattacaataaatagagtttttttttaagaggctacaatagatagagttaaaacctttttttttaatgaagatagagtttaaactcaataactataaacagcataaaaatcaaatatgctttttttttaagaaaaaaaatcaaatatttaatacaatattcacaatagacaatgaacccctcaattttacacacacacatatatatatatatatatatcattaaatatttataaaaatctaatttttttacatacttggttttttccctataaactcaagcatattattaataatcgactgcgaaatataatgacgaacataatagataaactttagattagtgcatgacgtagatgctcatgcaagaacataagtcaatacattagcatgtcttttcacaaacttgactctaaagtttgaaaataatgaacggatttgtctaccctcatctaggttgtctccaaattcagaaaaatcaagatgtaagttatgagagagattgtttaaatttaaaaaaaattaaaataaataattttaaaaaatgtaagtttttaataaataaatatgatttgtttcttaaatatttataaaaagtacttttgtctaattagacacagttatttattttaataattttttaaaatattttatttgtcacattagacaaaagttaaggtgtttttttatgaagagcaactaaaactaagttttatataaaatatagagattaaattgaatgatataaaactttgaagaaaaaaaaattcataaaaagtataaagactatttttttattttaaaaaagttcttaatttgtttcccttaaatcattcatcccattcacacagaacttaataaacttttctttagtatagagacatctaaattctataattattacttaaagatagttttatcgacttttttagcccaaaattgtagagcaattgttctttgggaaagaaaacatgtgcagtggaatttaattgagttattgggttgagttggatttttttagtgcaccaaattagattgggttaggtaatggatttataagttttaaattccatcaaatccaaccaaccagactatataaataaatatataataaaaattagtaattatctaatttttttatatgtattgtatgtaagagattatgagtaataaaaagtaaaaagattccaaatcatcactcttgttcactcgcaggccatgatagtttattttgattttggagattgactcaaactaataattgagttgtaaaacaattttagaatactaattgtgaattataaaataatgaagtaatgaatattaattgttatattataatgattaattaagaagcaatgaaaaaatattaggtccggttgaggatggttgtgagtttgccattttcgattttaaaatataatttgaaaactgaaacgtgtttggataaaatggttgccagttgaattttttcttcttttcaaaacagatttcaaattatttcaaaaaataacaaaattaggtttgtggattttagttattgatttatcctaacccctcttccccctcaagtgctctatttctccctctgttgttcatctctcttccgcacagaccaacaaaatctccctctcctccacacagagaccagcaacaccaccactgaactcgcctctgccacctccccaatcctcagcttcaccaccagaacacgcgtagcgccccctgcatccactgtatccccatcttcaccaccattccccaatcctttatccccgcgtcgactcggaaaatccttcatggaacgtacgagcttctgcgcagccttcccgagttcccgtcacaacgaaaatccttcgagtaatttacactccattgtacagaaattacatttaaaatacaaaagtgtgggggaaaattaagcgaactgggtttaaaaaaagactggataaaaagtatttttttttttaaagcctttcaaatttaggcacgaattttttggcttccaacctgagcttaattaatttacattattaatttaataattaagacaaaataaggaaaacatgaaagaatttttttattcgcaacttgtacggaggatttgataataccgagcagttatatttctacataaacttcataataaaaaaactcatacaataaataaatacagtagataagaagaaaagagagagaaaatgacattaattttaagtcttgaccaaaatcaaattgtttaaagaggtcaataacaattataataacacagctttccctaggatgcaaattagtaattagttattctattcctatgctacttttgattcaagtgtaggcattctacttaagtaatcgaattcaggtgtgagctgtcgaaaactcgtctattaattatattcaacggcatcataactctggtagaaattcgtaagagtgtgagactatttcagacggggagaagggatatgggtttctgtgacacagttttatggttgatgtaaactaaacgcgggagattgggttaatttattagaattatgaaaatgactttggtctgatttgactaaatcctctctccccacgccaaaccaagctacgaaagttgactaggataacaagtgtaggctggcagcaattacctgcgaaggagtgagcctctttcccacgttgaactcactgaccctgacccacttcaggggtggatctagaaaataaattaaggggggcactttaaccttgcaaaaaataattttatgttcatagatttagtggcggggagttgcccccaaaattttttttaaaaaaaatttaaatcaatattttatgtacaaggttatgaacccgcttaaaattatattatatatatgtatataactaaaattatttgattaagaaaattcatccataattctatattgaaaaatccaaaataacaattgaatttgataatacaagtaaaatatattaataataaaaaagactgtaaatagcaactacctaaattaaaactcaaaagcttatttcaaaaatgtaatatgaaactgcagaaaaaaaagtgggtacagaaagcaaattagacccaaataagacaaagctagcttctcctattcttcttcttagttggtgtctgcggcactttctttctagtttccatttctgttcttataagttgatttctctttctcttcaacgaaaatttaaggggagacactgcccaatttcaccgctgtttcaccattccaacaggggtattataacttgatcccaaaaatttaagggggccacatgtgacttaatatgtcaatacaacaacaattaataaatcatccttccattaaagttttgccttttactgtaccatacacatttcctataggctcttcaaagctaaattcaattattgaaggcaaagaaaaagagagaagaccaaaggcaggtgtggaaggaagaagaaagctttcatcgaccggtgttcaactttaaacactgaggaagagccacaaaattattctttctgcagggtgcaaggtacagcttcaatgggaaattgctggggttctccacctcacaacccaaccccaataactaccggtaaccttagtacaggttggttgggttgttttgttctttggtctcaattcatttgatttctcatgtgttcatttaatttatgatttcccatgtgcaggtacgacggggacatctcaggcgatcagcagcggcagctatactactactacgactactacttcttctggaagtgggagcagctccataaatagcaagttctcagtgtcaagcggtggtcagccttatccaaatggacagatcttacctacctccaatttgaggatcttcacttttgccgagttgaaggctgcgactagaaatttcagagctgatacagtgcttggggagggaggttttggaaaagtctacaagggttggcttgaagaaaaggccacgtcaaagggtggaagcggaacagtaattgccgtaaaaaaactcaactctgaaagcttacaaggacttgaagagtggcaggtaatccttcataataatcaaaccgcttttactttatttacttctacatatccttttgttacttaatgtactccgctagctatgagcagcccctgtccccagaagaagatattttatgcacaaaaactttttggtagtatcacccttctccagcccagtttcaagcaataatttggaacaagaattagaattttgaaactcaaataataaccgtcgtcgtacccatgcaatttcccttcccttttagttttaggatgaaggcaaagcgtagcagaatgagcatactgcttcttacttggatggcattgactgctttactaaacagaattctaagatctcaaatctggaaatatccccatgtcaccgtgtgggtagcattattcacagaaaaaagcagttgaattgctgaatttagggagtttctgaatagtgtagctggagagtttcatcatgtgtaaattgtgtaatatattatggtattgtaataaaatgaaggcattggtttgtgtccccagccccctcctttcgttttgttacttgtttcatcaaactgttttgtcgtacacttataaattgctattaaactaatggttcattcatttggtgcagtccgaagtaagttttctaggacgtctttctcatcctaatcttgttaagctgttgggatactgtttggaggaatcagagcttcttctggtctatgaattcatgcaaaagggcagtttggaaaaccatctatttggaagtgagtgcttaatgccactgtcttggcaagtgtattataagttcaaacatgaattgaaatagcaaattaaatgtatattttcaactaaaagctacattattttaattgtagggggttctgctgttcaaccacttccttgggatataaggcttaagatagcaattggagcagctcgtggcctcgcattcttgcatacatccgagaaagtaatttacagagacttcaaggcctccaatatattgcttgatggggtgagttctgcacaaaataagcatacacaatatatatttgctgttgccatgctatgagcatgatgaaacaaattaatgttttacttattttctatcttcaacatcagaaatcgttttagtttagtgtgtactattgggtggtcaacttaattaatttctgttatgctacagtcctataacgcaaagatatcagattttggcttggcaaaactgggtccttcagctagtcaaacccatgtgacaacaagggtgatgggcacgtacggctatgcagctcctgaatatgtggccacaggtaatgtcacgctgttctaattgtggtgcatgtgcatatttggtaaaactgatttttttcttgtgttttcaaaactctgtcagtaatttttgaattataagctgttagatacaaaataacccaattgaaacgtgaatttaaagcaagtgatgttattttgtccagctgttttgtcatgttcaagtttttttgtgggggtgctggaaatttaaattgattattagtgtaccttgaaattttgtgtagggcatctttatgtaaagagtgatgtatacgggtttggagttgttttggtggaaatactaacaggcctacgagcacttgataccaatcgtccaagtgggcaacaaaatctaacagagtgggtgaaaccctacctgcttgacagaagaaaattgaagggcattatggattctcgattggaaggaaaatttccatccaaagctgcattccgtatagctcagctttctttgaaatgtcttgcatctgagcccagacatcggccatcaatgaaggacgttttggagaatttggagcgaattcaagctgccaatgagaaacctgtggagcctaaattccgttctactcatgccggacgtcaaggtcaccaggctgtgcaccatcgttctccacgtcaggacggtagtaattagtttctcttaagaaaactaatccctttggttgcttgtgttatttgtctctccgtttaagagtttgcctgttgttcattatgtatttcttggactcacagatttgtacgggtaagtcatgcattactgtattagtattgtaaagtgtaaattattgtgtgttctgctaaacaaatggagaggtctctagtacaacattatcagggaagtgtttgcattaaattcaacgagtctatctagagacaatgtaattgtttacgtatatatggactggtgaaagagagaagagtccagaaacaatgattaattacaaagcagcttcggttttgtacaactaacttcgtaacatattcaagattatagtgtaacggacattttcttctgtgcgcctgttagtttatatcttatctggcattttcttcttgcactccccattttaaattgtgtggacaaaattgcccttaatcccacaagtctcaaccctaaatctacacaaccgacccctccactgtcgcctccgcctcgatagcacgatttctgacgccgatgccgttcctagtgctaacactatcgcaccactgtgactcacccaacaaccaacacaagaaactagcaccgacgagaaagtccgttgtggcgaccatccccatgaagaagcccttcttcttcaataatgtcgatttgcttctacggcttgaggctatggttgtggtccttcttggagaagctcacagaaaaggtgtggcgcaagtgcggcggagaagcaatggggatgagaacagacgtggagtgaaacgatgtcgttgggttttctcttgggagtttgcgaggtagtgatgaaggagaggctgggggtggtgcagcgcagatgaaaggtctattagggtaaaaaggaacaaggatattgccctatttcagaataactattcttaaatataaaaaatacattcaaaaatagatatttcaaaataagttttggagtacttattcatattttggaatgtagtttttttattatttaagattaaaattattctttatgtaagataattttatttgagttgcacacaattattattaaattaaaataattttatgtctattaattttcacacttaatgataataatatatcatatatgataagtctcttaatttattataactatcttaaaaattatactaataataatttttaattagttgatggtgtaaaatttctatagtataaatacatataaattaaattctatcattagagtattgttagagatttttaagagtttaaattttatatattttcagagtaaaaatttgtgcaatcaattaattagaaattattatttcactattaacatagttataataaaataattatattttttggtaaataaataattattttataaagtgatttgtaattaaatgataatataaaaataataaacaatgtatttactcatttttttagttagatgaacgattacataggaattttaagaaaattaaatcaggcttagtaggatttattcaataaaataatagagattaattactcaataaaagtttaacaaatgtatcaaaatatttatcatatatttcaattaagtgggtcccaaaaaaatatgagaaatatatatatatatatatatattataaaataaactttcaatctaaggtataaactttaattgggagtatttatatttaatgcttcataagatcatgtcatgtcatgaaaataagaaatcaagaataatattaatgtacaaatttggacatagaaagatgaataagactaagagaagagaaaaaaataaagagaaatatgtgaatgtgataggaatgagaatgagaaataagaaagaaaaaaagaggaaaaataagttataacatagtaagtaagatgtaattatctcaaaattaattgttttaagagaaaatactaaacaattagcttagtcgttaaaaatggaaatggaaaaatatccgtgggaaaatgttaaattcaggaattaatgtgactgaatttagaaattcaggaaccaatgacgtaagagaaaaatatccgtgggaaatgaaaaaaagtaaaaaaaggttgaataactggccttgtaggttccgtctaaagaggaagacgcaagcatagagttgagttgagttgagttgaggaatgaagtagcgtagcagtgtcatcattcatcatctgatcggcgttgctatggatatcatcttctccgttgcttttctattacaggcaagaactgattcctctcctttctctttctctttctcttaattccctgttgatcggttggttgacttggactatcacactcatttccactgtccatgttgatgtaggtattcctactctcttcttcgcctgctacctcacaacatgaaacctataggtacgtacggctaaatctacattcagattctttttttccgaaccactaataatttctctttagggctaagcattctgaagaatactgcgcaatgtatgatatatgcggtcaaagcagtgataacaaggctctcaattgcccatatggttccccttctgtcaaggtaattcattcatctcttttttactaaactaattaatgccgcaccatcttcatttaactataatcttctaactccagccatcagacctactgtctgccaaaattcaaagtttgtgccccaccataactggaaatgtttgttgcactgcggatcagtttgacacactaagagtccaggttcaacaggcaagttttttaactcggtgattttggttgttgtctgttgcattagctcgctcttaaccatttctagcttatgataaattgctttatctttttcttggccgggggtatcccaaaaacttatctaatatgcaggactagtatagaggagatgagggagaatatatacagtttatgttggactggctattttatgaattttcttttactactctcattaatcacctcattgacatgatgacatattgacctagacccttatcagtattttgtttatttctgtttttattatgcagtaacagaaactttgtatcttgcaggctgtaccaattctagtgggctgtccagcatgcttgaggaattttctgaatcttttttgtgaactttcttgctctcctaatcagagtttattcatcaacgtgacttctatttctgaggtcaggcatttccttctctgaacttgttttttagtaacacttttttttttttttttttttttttttttttactttttaagtttttgggtggctcatttatggttacaggagtgttttctgtgcttctaggtttatatatatatatatatatctttttaaagtaactgtacaactttggcatttgttttcttttagctgcatgttaccctatttgttagtttttatggtttggagatgctgtttttggagttccaggaagtctataatactgaacgatttggggagtaaaatttccagttattcaccagaccagtgttccctttaccccttgtttggttaccatggaaaagagaagaaaggaagagaattgtgtggaaatgtagggtgcatgtgtgtttggttgtctggaaatttttgaatttcagtatgggttccatgccttttatttcttacctaccaaacaacttcaattcaaatatttcctctctattccattgcattccattccctccctttctttcctctcaaccaaacacaccattaatgcaattattttatgtatctgtagcttcattgcaaattatgtagtggttgcttccgagtttataataaagagaaataaagtgaaaataatatatagtctctagagccgataaaaaaaaaaaatctgtaggtaggcttgtatcctcattgcaagcttattcttttcttatgacagtaggttcctctccactggtggatgtttaaaatgaaaaaatacaacaataaagtagctaaataatggtatctattgatgaaatcataaatgaaaactttagttattaggttaaatgctaattgctaattcaggtgtgaaatatgatgattttagtgaacttgcaatattgtttagcttggtattggcaaactgcatatgtttagctatagtttcttaatcatgcctcattgctcctataactaaccaatctttcctcattaaaagagtttagaagaatgtaatgatttgatgctttttgtgtttttatttgttaatgttacatgtttatgataaaaacctttggagaaccacaccacaaaagctaactgttgaagttggagagcccaaagccttataaacccccccctagaatcccatacttccaatgtgagactcaagtcctatatcttgcaattggatcctaacattctaccatgctccgcaacctcaatgcccatgcgggatgttttgcacccataatcatgttagtgttttatgtagacttattgggaaaaatgaaacttagttcaaatatttataaataactagtatgttgagttgtgcactagcacggttgccttgttccttatatatgtaccaaaatggatgacttgtaactatagtaataattttccattgtgctgctggtgtcattttccttcttttttattaagcccaagtagctttcttgttgatataaggtccagttttttttgttatattttatctttagtaggcaacaattggtttgggcacatataaagaagaccactagaagtaccagtgatgagattagattgcatggtttttagcatgtgaaaagggggagaggggagacttagaagaacattggaggaagttgttaagaggaagggatctcaaaagagtgatgagagagagagcgagagagtttagagagagagagcgagagtgcagagaaagcgagagagcgtttagacagggtaacagtagggggggtagaagaggaaacccagacagccaccattacggtgagcttaggtacggagaacttcctgcagcaacggcgacgaaaagaagcacgacggcaagaccaaacaattggagggaacatacagatatctcatctttctattttacgcgctttcctgaggatctgggggagaaggatttgtggttcatcttcaaaaaatggggggatgtgagggaagttttcatcgcaaaaaacaggaataaaagtggcagacgttatggcttcgtgcggttcaaaggtgttgagaatattttgcacctggagagaactctggacaacctcatcatcgggggccttaagctacacgcgaacatccccaaacatgaaagggaggaccgtattagagcaatgaaaggcaagaatgttatgtttgaagaaggcgtaccaggtgcccacgcagggagagatattcatgggccaactcacaatcctcaccttccaaggcaacctgtccagcgggcaacatatgcacaagtggttgccaaacctaaatatgctggtaggaaaaaatggtatccgaagcgccgttacgactttaacaaaccatcctcctcgacgattacgcttgagattcaaatggaaagtaaaaaatggcttaatgaagcatgggttggaaggctgaagaaactgaatatgttcgataggttggaggaggaaataggatgggaaggagaaggggatatcagaccaaggtatattggggaagatatggtacttctgatgggcctaaatgatgctaaagtggaagagatacgccgacacgaagaagtatatggaatggaaagtttccattctctggaaaagtggaatccaaatttgaaacccgccttccgtcttgtatgggtactctgttggggtatacctttacatgcatgggacacgacaactatggccaagctagtgactgcttttggtgaactggtggaagtggatgacgaaactgaggatctccaacgccttgacagagcgcgcttactcatcaagacaccatggaaaccatttattaggcataatattatggctaccataaacggagtcgatttctcgattaacttcgttgaagaatcaaacgcggggacagatacttgccgatgctcaagacggtgtggtgcggacttctccgacgaagttacatccatggacagttctgaggcgggtagtgacttggtcgagttccagtcacatgggtatgtttcaaacaccccgcagcctgcgcctcaaccgcgagaggtcaccccgaccacctcgccgccgacggtggtagcaaccgaggaactcctgggtaacccagacgaggagcggtctgtacactcaaggttgggacagaaccaagcggacagtgctttcggctctgacaactgcaacaacagcaaaaacgctgtcttggtcacatcaactgacaagctgtcacctacccactgtgcacacagtgtggaaaagggaggggagaaggagggatgtcctgaatcagactcgcttttgcggaagccagaagaagttgttgctacaaagaggaaggtcaatacgggaaagctgtcgggagcagcaaatgctggatcagacagccttatgtcagggcaagagagagacccagctatggggaatacatcagataggatggggttggaatcacgtgaggagacaatagtgagagattctctagaggctgaagggggccccactatgggagaaaggatattatcagaagaaaataaaaacaactctttgggccaaaaaagtaatgggcctgaatggcaagtatattccagatgcaggggaggtaaaaacaaggctgttctagttaaaaaccaagctcacgacctggacgctaataataaaaaaaaaaaaaaaagaagaaagttcatctgtgaaagagatggaagctaccaatggacaacaaagcccacttacacccataaaaagccacaaggagagtggtttaaaagggattactgaatgggggggaggatcaaaagaatttgtcactataggatccagctccagctcgacatctataaattcttcaaaacaagttgacttctgggcactagcccaacaatttggggtcaccagccacaacccggaagagttgattcacaagatgaagtcattggaagaaggaatcaatggtgaggcattgaagtggggtttctctgatggggatttatgaagatcttatcatacaacataagggggctggggaggggggtgaagtggaattcaataagaaaaatggtgagcaaacacaatgtggatctgttatgtctacaggaaaccaagaaggagcttattgataaggtgttatgccaagctttatggggagattcaggtgcaacctgggaatcacaatctgcaatcaacaaagcgggaggtttactttgtatttggaatgaggagtcttttaaagtagaaaaaaggctgaaaggcagcggattcatttatctggaaggactatgggtacctgataacaaaaagatcacaattgtcaatatatattcaccttgtgatactttgctgaaaagatccttttgggatgagattaagctgctgaggatgacaaatatgggcggcttatggtgcatcattggtgatttcaataacattcgaagagattcagaaagagtgggagtggcacagagcaaccaggaaggtagaattgttaaggaattcaatgattggattaaggagcttgaagtggaggaagctcccaggattggaagaaaatttacatggtacagaccgaacggaacagcaaaaagcagattggacagggctttggtatccgctgaatggctaacattatggcaggggtgttcacagactactttggaccgcaattactcagatcattgcccaattatgctcacatgttctcatatcgattggggccccaaaccttttcgttttcttgactgctggttacaggacaaatcccttaaaaaggttgttacagaatcttggaattctttagctggaccaggctggggaggctttatactcaaagagaagttaaaactgcttaaacagaatctgaagctgtggaataaacatcagttcggagatattcaacaaaaaatcagaagtgtagaactggaactgaataagcttgagctagaaacagaagacagacaaatgacagcggaggaaattaaaaggcgaaaacaactacaggaagatttgtggatggcagcaaattctaatgcttcgttattgaggcaaaaggcaagatcgagatggatcaaggaaggggactgcaactcccgtttctaccacctgtctgttaattggaagcgacggaaaaacttgctaaatggtgtgtcagttaatggggtttgggtagatgagcctggtagagttaaggaggaggtaaaaaaattcttcaagcataagtatcaagaacctgacttcaatagacccaaattagatgggattcaatttaaatccctggatcagcagcacaatatttctttgacagctccttttgagctgtctgaaattaaagatgctgtatggagttgcggtagtgacaagagcccgggaccggatggattcaatttcaaattcataaaggaattttgggacacactaaagcccgacgtgttccgcttcatggatgaatttcatgccaatgggatttttccaaagggagcaaatgcctcatttatagctttgatccctaagattttggatcctcaaagtttaaatgaatatcggcctatttctttaataggctgcatttacaagattgttgccaaggtacttgctaacagactcaagagggtgatgcctgccattattgacgaacgacaatctggttttattgaaggccggcagctattgcatagtgttgtaattgctaatgaggttgttgaggaggcaaagaggaataataaaagctgcttaatcttcaaggtagactttgaaaaagcgtatgattcggttagttgggatttcctcatgtatatgatgaaaaggatgggtttttgttctaaatggatgtcatggattaaaggctgtttaatttcaacttccatttctatcctcataaatggaagcccgacttcagaatttcagcctcagagaggtctgagacaaggggatcctcttgcccctttcttattcaacattgcagcggaaggcctcactggaatgttgagagaagcccaagcaaagaacttatatgagggttttaaggtgggaaggaatcatgttgatattagcatccttcaatatgcagatgacaccattctctttggggcagccaccaaacaaaatgtgctagctttaaaagtgttgttgctgagtttcgagatcgtgtcgggcttgaagttaaattgcaacaaatgcagtgttggggctttgggcatgaatgaacattgggtttctgctgctgctagtctcctacagtgtgggatgttgtccgtacctttcaactatctgggcattcctataggagcgaatccgaggagggtttcgacatgggagcctatcattataaagtgtgcgagaaaactgtctctatggaaacaaaaatacctatccttcgggggaagggtaaccttaattaaagctgttcttaactcgatccctatattcttcttttcttttttcagggtgccgaaacaaatttctgcgagcttggaaaggctgcagaggaggtttttgtggggtggcagccaggaacagaagaaaatctcgtgggtgagctgggaatctgcatgtctatctaaggaaaaaggagggctgggaattaagaaattagatagttttaatttggctttgctgggaagatggagatgggacctattccatcaatcgggggctttgtgggtaaacatcttggagtcaaaatatggaggttggaggagtcttgacctcacaaggagaacgtcaacagaatctctgtggtggagagacctcagatcgtcattctcatctttggaggcagatggatggttctccaaaggtgttaggtggaaggttggttgtggagataaagtactgttctgggaagacagatggatggaggacaatttatctctaaaagaaaaatatcccaggatatatcagatctctctacaacaaggtcagcctatacagcttatggggtcacccaatcagggaggttgggagtggcactttctatggagaagatctttcatggaaggtgaattaaatacggcgataaaatttctggaggaaatacaaccactgtcagctgctggacagcaactagattcatgggtatgggcgagagatcctagcggaatttactcagtgaagagtgcctacagcttgcttaatttggaggaggccaatcaagacagagatgaagttttcaacatcctgtggaaattgaaaatcccttgcaagatatcgtgctttgtttggagactcatgaaggatagattacctacaaaacaaaatctcagaagaagaaacattgacattgctgataccacatgccctttctgtcgcagctttccagaagatgcttcacacctcttctttagctgccctaaaattctacctttgtggtgggaatctagggtatgggcaaacatcgtaggagtgtattcggatacaccaaaagaacatttcagacagctttctttctgccacctacgtgggaacaatcttaataggtggctctcttggtggtctgcactgacttggcgaatttggttccataggaaccggatcctttttcataacgaactctttaatggttatcaacttatggaagatgctatatttttttggtggtcctggcttaggaacctagagccaggttttgacataccttttcatcaatggtctagtaacttgagggaatgttttgtatcttaggggtaaacttagtcgttttctgttttatccttgttatcgggcagacctacgatggcttctgttttaagccttcttagttctgctttgattccttttgtatacttgtatagcagtacatcttgtactgttttgtttcttaatataatatattatatttttgctgataaaaaaaaaaaaaaaagaggaagggatctcatggtgaataatatccatgaagatatggtcttttatcaagctgaatagtcttgtgtgatccatgtggatgacctcacctaatgggctaagatttttgtgtttatttttatcagtaactaaattggtgaatatagggggaaaaatcaaaacaaattgcattattaataggcaacatcacgttggcccacccaaataatttttgtgaaagaggacaacttacctagcgctacctcccgaagcaaacaaagcaaatgaatgaggtggtttggaaagaaaatcagtgattccaaatcaagcagtagtaatttccgttagaaacccaacaagaactcaatcgttgaatcaactgtacaaaaatatatcaatggttagaataagagatgaaaaataggcaggtaatgttttaaggagcatatgacattatgacgtattatattataggaaatactttgttttagcatgtctctcatgcatcaagccacttttgttctgttttgtttctgctagcttgtacttacagcagtacttcttgtactgtgttgttttcttttcatctatctatatataattatctttgctgataaaaaaaaaatattataggaaatactttgttttattatatagatagaaaaatcagtttttttcatgtgatttagtcttataaattcactctagacttgaaattataatttgatattgaccatattatgttcatttcaggttaatggtaatatgactgtggatggcattgattattacataactgaaacttttggagaaggtctatatgaatcatgtaaggatgtaaagtttgggacaatgaatacaagggccatagattttgttggggctggagctagcaattttaaaggtgattcattataacatgggtggatttattgtatgaaatatatgaactctgttattaagtgatcttaccttttcaattagaacgattcccccttcgtgtattgagtattgatatgttcattgtgcatgttttcctataatttgggatggatcttgagttttgcacaacaataaatgggaaaatggggagttaatttaatgttagcttactccttgtatgtcatttttttttttgatcggcgctccttgtatgtcatgtttgtagttctgaggtagaccgcagatatacatgtttagccataaaaaaatacaaaagatcctcctaagttgctgcagacataccttttcttgttcctattttggtactaagtagctgctaatgtttttcataccattagaatatttctttttctctttatctgcatgtattatacttgctcttcatctgctaatgtgttttgtttttgattgtcattgccagagtggtttgcatttcttggtcagaaagttcctcctggttttcctggttctccgtattctatactttttaagacaaccattcttgactcttctcctatgaaacttatgaatgcatctgtatattcatgtaatgacacttcgctgggctgctcttgtggtgattgtccttcatcacctgtttgctcgggttcagaaccttctccatcaagaaaagatccctgctccattagaattggatctctaaaggttgaaacaatagaggctggttttttctttataattaattttcatttgctttatgactgaataaattctctgttttttctttcttaaaagtaatgccttatgaatcataatctagtggaacaattggttccctactgaaaaactgtctttcagcttttgatacatgtgaaactggttttcgtataatgatacctacaggtcagatgtgtagatttttcaatggccatcttgtacattgtattggttttcgtgttgtttggatgggcattgctgcaaaggacaagaggaaggaggagacttggatccggtgcggaacccttattggatgatatggttggtgaagggagtagttttgctaacctccaaaaggatggaactcatcctgcagaggtatgtttaaaagcttgttttgtattgacccatcgttttggcattcagaaggaagatttcatttcttcttgttattattataattgtggaaaccagctgtcccaaaagctaattgttaggtgaagtcaaatgactgattttataattaaataatctgtgcatatcaattcatgcaagagctctttgggcttgaaacatagataatgttcaggttcgcttgtcttgtgcttaatttcaacttatttatttaaaagaatgggagctgcaagggcgatctctagactacttggtcatatagactttaatactatgtaatgaaccaactatctcatagagatcaaatgttaatcaattaacactaagtataggtcttagaatgtgggttgggcctaactctaccccaaaagctagctcatggggtgagggttgccccccacttatatattctatctttgccttatctctagccattgtgggacttgggtttttcccaataataaggaacctttatttattctcttaaataaatgatattccaaatcaccaaatacataagaccctttccgttagcatttatattatgtgtagtttattttttataataaatagtcatcttttcatacattgtgaagcagctttgcagattgaagtcttttgtattctctgtttgaagaaagtttttaatccctcctcaaggttttggatgtgcaaagcagaataaattgcttaggaaatgtgttcttttgcctggtgtatgctgcttttagttggagtgaaataccttaattttacttgatgttttctttcttcatttttttttctcctgttacatgctccttttctttttataacattttttcaggtttcacctcaccagtcttttgaaggagtttctttgtattattatgcaaagggactgctaacacttctatgctattttttttttatcaatcactccccttgctatagggtgatatctgattctccatctctgtacaacttttctctcatacaacttttctctcataatgaactcttttgagcccctccccccaaaaaacaaaagaaaacattgttttccaaaatccattcctgcttaaacttgaagataatttgaggagagtctgtttttgataactggaattgtatgcatagtagtggttgttgaaccatattttgtattacagtatttttactgcacaggactgctacccttgaatacactgtctaaatttcttagaatctaacataagtaaagtagggactagggagctattttctattgaataagaaattcatttaagatcttggagttctaggaaacactggttatacatggtatgtaaaatgatttggataatgcatctgtaatacaactttgttgtgttttcttctggtttagctgtgggacctgaattaactcctggaatcttgtttctcaatttgcctctttcaattctatattaagatgtgttagagttaaatgatttatttcacatgtataatgagcagttttatttattactcattatgatattgttggctttgtattgtcaaataaaaggtgcaacggatagatcctcaagggcagaatgtggtgcaattttcttttgttcaaggatgcctgtccagcttttacaggtcggtggctctagcagttcttgctaggtttacaattacataatctttgattttgtttatgcattcaggacatatggaaggtgggccgctagaaaacccacaattgttctttgttcctcattgacaattgttgttttgctttgtttgggtctgcttcgttttgaggtggagacccggcctgagaaggtaccatattttcatctatattatctccacagtgtacaatttggatttgcttctgtaacttctacatccattttttttatctccttcctggctatcaaataatatctaccttatcctttttatgctgttactttgttttttttaatctacccttagacatgtttggatgagctgttggaacatatgctcaaatgttaagcacattttgcataatagctcaagcaaattaaaattgttttacactgtgaacctatacttataaataatgtcaagaaaaatattttcataaaggcttatggtaccaaataagtgcttctaaacaaaaaaaaaaatactgtccaagggttcattcttatagcaacaacctttttgtcttcttgagctttctggatagatacataccagtcaatttatgggccttaattcctgaattttagagaattctcaatattctaaatatatataatcatgatttttctgtggaatggtttttgtgtttgttttcttgttcttttacttgctggaggacatttattctctaaatgggtatcttgctctcgctgcctctttaataatatttcttctttaatcctccctctccaacacacaacaaaatgttttctagtacttcaactgcaataagttttaaaaggaacatatatatgctcgtaatccttattttcttcttgaagttgaagaatatcggccttgctgtcttctttgtgttgcagttatgggttggtcccgggagtaaggcagctgaagagaaagagttttttgatagccaccttgctccattctacagaattgaacaggtttcagtttgcttgtaatttattgtacttttctttctggtctcgtaattccatgtgtgtcatctacttactgaaatctaggctccctcttatgtaaatgagttatctagcatgcctgctcatttgcatgtttggcctttaccacctctcttccccacccccacccccccccccccccccccaaacaaaataaataaataaaggaagaaatatattaagatggagagaacaaaattagagtttgaaaaataaggaatcctcaatgaaatgaagctacctaatccctgaacatatctacaagggagatctcccctcccttaaaaagaccatgtgatttatgccaaatagaagccaaatttctgactttttgatccaatgaaacctccttaaagatacgagagatacttgaatgtattttccacacagaaaaatgatctatttacattcaagagtattacaatgacgattaatgccaaagactatttacaagggagcaattaagataccactacttcctaagatacactgaggctgaggtcagaagccttggctgctacagctgacattttgtggattcagactcttcttggtgagcttgcagtccctcacctcactcctatggtgctgtgtgataattcaagtgctctgataaaataaaataaaaagtgctctgataccatcttgataaactgatattattgatatcaaaggagaaattacaattggtcaaagagtctctgtttacactgagatatgtataggcacagagatcctaactaactagtgacagttgctgacaatgtactaaccaactgacagctgtacacagctgtattgactaactaagtatgaatgagataaatatctcagcaaatctcaatagatatgttttgtttatttatcaaataagacattttgattttattattatgttgatattgatgctgatgcaattccaatttccaagaaagttttccgtttctatcgaaaacatgtactttgcggagaatatgaagtcaaccatagtttcctttttaatgtttttgttaagttgccttcttatttcctgctattattttatctgaaataaatcacattttaaaatattgtttgtgtatatttcagctcataatagcgacaatccctgaatctaagcatggcaaaccgccaagtatcataacagaagaaaatattgaattgcttttcgaaatacaggaaaaggtgttttgattttcagtttttttacttactagaatttaaatggagctgttgtatgcttagtggggccttctttattaaaaaatatgtttacatttcaatattccaacaggttgatggaattcgtgcaaattattctggtttgttagtatctctgagtgacatttgcttgaagcctttaggctacgaatgtgccactcaaagcattttgcaggtccaacccactaatttccaaattattcctgtagtacttttgaattgtgtattgcgaataattaattatttggcttctattatctgtaagttgtacaaccagttggcttttcttattcagttctatatcaatttactattctttttttttggcatacttagaagccgtcatttgatttccttttttgtctttattttattctaatagtattttcaaatggaccctgacaattatgacaactacggaggtgttgaacatgctgagtattgttttcaggtaaacttctgtgatctgattatggattaccttagttttgttattcaaacgagtttaatttaaaacagttttactttatgagcagacaaatattgtaaaacaaaaagattaatgtgttaagaaacactaaattccaataagcatactaattcaagttgaaatatttgcataggtatggaaggaatacctgcttttcatttcttttttctttataaatagtgtagctgtagtgtgtcaaatgcattgaatgtagaaagctccgttggtgcttctatacataattacttcttatagattatggtgaatttatctcatagcttgtgtttaataagacttaaatcttattattttattttatcattttcagcattacacttctactgaaacatgctttagtgcatttaaggctccccttgagccaactactgccttgggagggttttctggaaacaattattctgaggtaagaatcttgaattttagcatagatttctttttatgtgttactgctatgctgattcacctattctaggcttctgcatttgttatcacgtaccctgtcaataatgcaattacaaaagttggagatgagaatgggaaggcaatagcttgggaaaaagcattcatccagttagctaaggtatgactactaaatatatttattgcagttattaattcttgtgtagcttatatgcacaaaatcttcattttcattttatttttgacatctctccataaatccttatgttgctgttgttttcttgattattgaaagaaaattggttgtcatctttggtggtatattaaacttagtaattaactgaagaaaccaaggggacattttgttgaggagcattttggcaacttattgtctgataaggatcaaataaccactagattggttattcagtttgacataaacaacccaacgtaagtgtaacaattttgattggttaactattccctacaaacaaggcaccaaactagtgtgactctcccaagaaacaaccttaggatgacctagatgttggagttttgtgtaccaggtctaatctaagcagaagaaatgtggaagtcacggacatgatgtgccctttttgtagaaattacgcggaagatgcctctcatttattcttcagctgtgataaaattatgccgttgtggtgggaatcaagatcttgggtaaacctaattggggctttttctgttgtcccaaaggagcacttccaccaacactctttctgtcaatttaagtcacagaggtggcagatttggtgggttgctttgatttggtgtatctggtatcataggaacaggattatctaccataatgaagtgtttaatggtctaaagctgatggaagactccatttttttttgctagtcgtggctcaaaaatttagagcctggttttgccattcctttttatcattggtctagcaatttgagggactgttttgatgctcaggggagggtcatatctgtataattctaaatttctgttttttggggaggttttgttcctagcagttggtcagaacgctggtgtcttagccaatgctttaagccacctttgttctgagttgcttctgtttaggttgtaatcacattagtactacttgtactgctattatatattttcaataatattattatctttgctgataaaaaaaaaatctaatctgatcaatcaaaagctgaaagatgcctgagagtaagtaattttttttaagaaatagaaataactaaatatattttctgaagaaaagtccctcatcctatgatgaatatctctcgtcccagaaaaaagacctcatttgcctcttcattctttccagagagtaatgccattctctctttttcttacaaaaaatattaacttcattatctcttcctttcatctgtactatcccatcaccacactgctatttcttcttcttcttttggggtcttttcttccctgggtaaaaagcaccttgctttttagggagttagtctttgatagtgttagaagagcaaagggcaagagatactctcacactaatacaactaactcctacttaagttagagcacagatgttattcatacccagcttgttaaatatatttagaaaagccttagtattggcagatatgaaatactggacgagttgtattttgaaatgctacctgattgtttcactctaagaaatttgggcaagatgataaaccaagtgagattttccatttttcacgactataatttaccaaaaaatgaggtaaaaatacctgaccaaactatcttccctgaatgattgcaatgccaagttttttccatgttcttgtaggttgcttctgaagttgaactgttaaagtaaattgtcaatactttcctttgattccactcctgttgcacctcagaaaattctattcttatccatttgcaaacttttaaatgtcctcatcaaacttcccataattcctttctacatactgtaactcacatgcaacagataatctgaacaagcagcacataaaatttcttaccattttatttttcaagagacatatattaatttgggcctcaaactaagcacattagtctgttattggacatgagcacattctctttctaaagcccaagaaaatcactttcccattgacccatttatacatttaaagcacataaagtgtgtttgagtgatttgtttgcaaaattaattttgaatgaaattgattatgtaaaatttattttgaagtgaagtaatttatatatgaatgtttttactttaaaagcaagttagcagtaagcctcatgtataatttttttttttgtatcccatattagtttcctgatcacatggtccataaccctaccatagaatggaagccttatacaactgtaagaatctaagagaatttcagaaaactaaagtgaggtgaaattgttgattgtattcaacccaacagaaagatgattacacctcaatttatatagacagttaaacaactgtaactgttaacttattagactaagaaagttgcagatgaaaaactgtgtgttctcctgtggagaattctgcattaaatagtgctcatacaatttgatttctacatctgtgcattaaatagccaatctgcaataaatgctatcctacagctgggataactaattaaggaggtaattacagcagtataatgatgtaagatttgctgttttgaatggccaacaaatttgtgccaataataacagatattctgcaatttgtgccaattaataactaatattcttctaatcaattccattggcataactaacctgagttagttagtgattgctgtcaaacagctgtcctaacagataactaactaactatagactaactactaactgtagtttagcctttacagatcagtttaagcaaaaagaaaagtggaccgagtaagtatactccaatacttataatgttagatgttagattttgattgttagatgactctaggaaagaaaaacctgaggtctcggtgttagttaccctagcatgttctagtgaagtatgtttctgaatacagatttgtttatttgttactgatatgcatgcctctaaatctggctgtagcctgtaggcaatatattggtataaagtaaatgttgacccatccactgtcaacttttgaaataaggaaaagtgcacgagtgctttcagatacctacttataagtaggtttgagttaaattgattatattgtcctagtacaagtgtctatataatatgcttatttttttgagtgtgtgtacttttgcacgttgcatgatattacagatatgctagctgaatgctagaggtactttatactatctgtcttttcttctcattccttatccatacatattttgaaccaattttacatttggaaggacgaattgctgccaatggtgcaatctagcaatcttaccttgtcattttcaagtgaaagttcaattgaggaagaactaaagagagaaagcactgcagatgtcataacaatacttgtaagaaatttctgtttctttcaactgaatgtgaaaacatgatttgtgttgtgtgtaagctaatggactgattagtttggttgtggcttcataacgatgtgctttattggaatatacaataaatgtcttctccaacatattattaggtgagctatattgtaatgtttgcttatatatcggtgaccttgggagatagaccacctcatccatcttctttcttcctctcgtccaaggtacgttattttccttgaagctttcaattgtccttttcccatgatcccatctagtataccctgtgacactaaattgtttgtgtatattcaaaagtaaaaacttacatgcataatataagtgccaatacgtgctaaattgtacttcttaatgttaatgttcttaactaatgctcatggggattccaagcatctaaactacacagtagagttgaagtgtagaccattaattatgagatgagagaaaaaagaatgagaatagagaaacacattttattttctgaattttacttagcagagtgatctatttataataattgtgattaaaaagataataaataactgctattatcaagagaactacttcctaagataattcaactaagctaaatgcaataactaaactacatggaagaataattatcatttaatgctcctatttccaacattaataataataaatgcaaaggatcacagagttgacgaggaaacaatttgcatgttttgacatttgttatcattgtggtggggtgttagagatgtaatataaagagatgtaatataaaacagccacatgtcttcacctaataacttaagattttgggataattggttcatgacatggtatctgagcatctatgattgagtgatgtagaggttccttgctgccctacttcttctaataaaaagttaaatttcagctaaaggtaggtgagcctctgcatgtgtacactttaatccctaaaggttcttgcataagtaggcatgttagagatgtaatataaaattttcacgttttcatctaataaatttagcttttgcaatagttggtttatgacatggggagtttattttggaatttggatttactagttgatcattgtaaatattctcgtttgctatcatgttgtttgttcaagtatggagacttaggttcatcttaggttgccatttgtttttgacagagtccatagtattttctttaaattttgtgtttatgtagaatattatagagtattagaattagttgtggaatattctagagtattataattagttgtggaatattctagagtattagaataagtggtggaatattctagagtattagaactagttgtatataatgaaccctttgggtttcaatttgaatgaatgaaaaagagtattcacatttcaaaatggtatcaagagcaggttttcctgttatcattgtgcaactctgaagcctattttttttttttttaaaaaaaaggcctaccctcttttggtttgaggtgacttatggactcttctaataatacgagtgaggagtttcgtgcctctcctaattttgatggtgttttcatctccaaggctgggtatgagcaatttcagaaggtgatgcctcaatttgctgaagcaactagttgtgttgctcaacaaggtgttgctcaacaaggtacgacattccatgttaatggtagtaatcgttggattctcgattcagaggcttctaatcatatgacaggtaatgcaaccttgttttgttcttataccccttactattaactgccacgaataagaacagccgatgacagcttctctactattgctggatagggattcattaaactttctgaacacattactttgaactcagtccttcatgttccctctcttacttgtaacctcatctctatcagcaaacttacatctgattaaattgtgttgcgatgttctcggtccatgcttgtgtttttctggaacaggattcgggattgaaaattgacagtgctagagaggaagaagggctttactattttgaaaaggatcctaatgaaacaaatttttttgctcaccactcattatctttgtctgatgattgtaatgatgttttgttgtggcatcgtcggttaggacacccaaatttcttttatcttcagaagttgctcccaaacttatttatcaataaaaaatccagttctttttcttgttatatttgtcagtttgcaaagcatcctcgtgtttcttatcctcctagagttcgtcatgattcttctccatttaccttgattcatagtgatatatagggcccagcccatgagaaaaatatctctggtgctcattggtttattacttttattgatgatcattctagggtatgttgggtatatcttttaaaggataagtctgatgctgcatccacctttaaaaacttccatgctattcaaactcaattccagacctatatcaaaattcttcgaactgacaatggtactgaatattttaattctgttcttggatactatctcaaccaacatggtattctccatcaaagttcttgtcctaacacccctcaacaaaatgggatggttgaaagaaaaaatagacatcttcttgaagttgctcgagctcttttgtttaccatgcatatccctaaatatctatggggggaagctgtcttgcatgcatcatatctcatcaatcggatgccttctcgtgtcccaaattttcattcccctttatcttgtcttaccgacacctttcctttttttggggctcattctttccttcctctcaagttgtttggctgtgtggcttttgtacatgttcctcccattcaaaggtccaagctcgatcctaagtctattcgatgtgctcttcgaaaaggtaccagatcctgtactgctcaccctatttcttatcatatctcgtatgaaaagttatccccaggttttcgtgctttcaacactattttagacaatacaaaaataccaaaaaacatccaagaagcacttgatgacccaaaatggaggaatgcagtttttgaagaaatggatgcactaaaaaaaaatggaacttgggaatctgtagcattacccagaggaaagaaaatagtaggttgcaagtgggtgttcacaataaaatttaatgcagataatagcatcaacaagtataaggcgagattggttgctaagggattcactcagactcatgggatagactattaagagacatttgccccagttgccaaacttaatactattcgagttctactatcatttgctgccaaccttgattggcccttgcaacaattaaatgtaaagaatgtctttttgaatggagatttacatgatgaagtttatatggatccaccatctggttttgaaaaaggagacggttcagtatgcaagttgaagaagtctctctatgggtttaaacaatcccctagagagtggtttgagaagtttacccaagctgtgaagggaagaggattcctccaagctcagactgatcacactctattttataaacactatgatggtggcaaaattactattctcattatttatgttgatgacataattgtcacagaaaatgattgtgaggagataagctctttgaagcagtttagctgactagtttgaactgaaagatcttggagttctcaaatatttccttggcatggaggttgctcgtagtaaggcagaaatttctttaactcagaagaaatatattctagacctgttgcaagaaacaggaatgcttgggtgcaagccatcagagactccaattgatcctaatattaaattgggaattgaagatgggaaagaagttgacatagagcagtaccagaggttggtggggaagttgatctacttatctcacacttggccagatattgcatttgcggttagcatggttagtcaattcatgcattcttctaagtaaaaacaccttagtgcagtttatagaatcctcaagtacttcaaaaacacccctggtcgaggaatgttctttcaaagaggacacaagaggttgattgaaatctatacatatgcaaattgggctggctcggcaatggacagaagatccacttcagggtattgtacctatgtctggggaaatcttgtgaccaggagaagtaagaaacaaacagttgttgccagaagcagtgcacaagcagaattttgggctctagcccatgatatttgtgaaggaatctggttaaaaatacttcttgaggaattgaagatctcttattccctacctgtcagattgtattgtgataataaggctgctgtcagtattgctcaaaatccaattcaccatgatagaactaaacatgtggaggttgatcgtcattttatcaaagaaaaattggaggatggtagtgtatgattgtcatatatacctaccaaagagcagacaacggatattcttaccaaaggattacacaagcccacctttgaggatttgattagcaagttgggtatgattaatatatatctcccaacttgaaggggagtgtagaatattctagagtattaaaaatagttgtggaatattctagagtattagaattagttgtggaatattctagagtattagaataagtggtggaatattctagagtattagaactagttgtatataatgaaccctttgggtttcaatctgaatgaatgaaaaagagtattcacatttcaatagtttctcatggatcttacatcttacttctctcaaactatatcctctctatgatctctctgatttctctcaagatcttaagttcatttgttggtgtcagagctgttttggtttggttccattatgtgagccctcaagggagcttcattatttgtgagagcagttcacttttcaatttgaagattcggtaacaatttactttagtgcctaaagctttaagtttcaaaggggttttctgtttcctgtgtcattagtggtgtaagatgggagacaaaggctgatagtaatattggactattagagtagaagagtagaattcccttttctactctaatatggaccaggtttaagttgttgaccattttttaccataattaatgagaagacctataatgtacattctatcttgaattcttgtgtaggttttcatgcttatcacaactgcattattttttttttttccaattcttttctcatgtggttgatgcagatatgatagaaattaattttaactttttcaaatgttatgggtagcctcttcaactctggctatttactctaatacttctcattcttcaacttgatgttatccaggtattgcttggtcttttgggggttttgctagttatgctttctgtccttggatcagttggatttttcagtgctattggagtaaaatcgacactaatcataatggaagtcataccttttctggttttagctgtaagtctttgtttttatcattaccaagataattttatgaactgccatcagagataccatatttatcttatataagtattatgcaagttgaatggactaagtgcctgtttggttgtattatagacagaagaagaaaatacaaagccactgaaatctcttacaagaacagtatttatactgctgagattcagttatgactgtcaactgactaaggctaacagttaactaactacagtagaaaaactaaggttagttattattatttacacttacaccccccgcaaactcaatggagctgagaaaccaaaggtagctcatctacattgagtttggagctcaaatatgtgaacctagtagaagacaaaggcttggtaagttaatctgcccattggtctgggcctggtatatgctgaaccaccagctgcttagtaagaaccttttttcggacaaaaatcacatccaactccatatgtttaattctagcatggagaactggattatgagctagctgcactgcactggaattgtcacacagcatgataggtgtagaataagggactgcaagttcctggagaagagtctgaatccagagaatatcagctgtggcagcagctaaacttctatattctgcttcagtactggacctagaaaccaccttttgctttcttgatcaccaagacaccaggttaggaccaacaaagacagctgcaccagatgtagatcttctgtcatctgggtctgaagcccagtcaaagtcacaatagcctctaagagaaagatggttattaagagaggcaggatacagaataactccagaatgaagggcacctttaaggtacctcaaaatccttttcacagcagtccagtgagactcaagagaagccataaactgacatactttgttaacagaaaaactgagttcaggacgagtgattttgtaacattttgcaaggctccaacaactgatctgtaaaaggagggatcttgcagtaaatcagagccatgttggagagcctgcagctagagttcataggagaagaaatgggctttgcttctagcatattggttttctgtaacagatctcgaatgtacttggactgagtcatcaaaagtgctccactggataatgaatgaacctcaatccccaaaaaatagtctaaagagcccagctgcttgagagaaaatgaagcattgagttgctgaattaacttttgcatgagtgtaaatgaatttccagtgataataatatcatctacatatactaaaatgtaggtagtggtagaggaagtcttgtaaatgaataaagaagggtcacatttactgtcagtgaacccaaacttcaacaaagtcatagcaacaaaccactttgtatctcagagcttgtttaactgacttggcttcagtatgaacaagaagtaaggaaggatgaattcttggctgcactatgtcagctttggctgttgtaaccataggatgcacattgtctggtctgacatgagcaggttgtggagtattgggagattcagttggagacaactgaagagggtcatcagacagcactgtatcagtatgaacagaggcagaagaagccaaatgggagactgtgcaggatcataaggtcaggagacaacattatcagacctggaagcctcaacagaaggtgaagagtggggagcctcaggagaggatgaggaagaaggattagaattgagcggaggatgagaaactgactcaatgacaggtaaggtggttaaatgaactcagtaggtgtagaactggaagtaggagaggaaaagagagaaggataaggaaactgattttcattgaaaataacatctttggaaatgaaaattcactcaatcactggctaaacactaaacaaaggttgatgagatgtctgtcctacaatataatgccacacaatatttgatttcataaccaccaaataatttcttttgttgagtgtttgcaatgaaagtgggcctcaacgattttgttgatcgtttgaaagctcatttggtggctaaaggctatttccagacttatttccttggttacattgacactttctctttggtggcaaaaaattgcttatgttcttttatttctaaccgtggatgtcatttttgttggcctccttaacaacttgacatcaagaatagctttcttaatggagatttataggaggaagtacacatggaactacccattggttttattgctcagcaggagtttggcctaagtttacatgctttgcaaatttgtatatggtcaaaagcaatgtccttgcacttggtctggatgttttagtattgtattacaagcctttggcatgactagaagtgaagccaattattccatttcctaacaatgccaatctcttggtcaatacatttaacttgtctatatagaggacattatcatcaccaataaatattaggatgatattgaatgctcgaagcagaatttgttcaagccttttcagtttaaggatgttggcaagcttttctctgggtatagaagttgcacaatgtggatttcctagaggaaatatgccttggatattctagaggaggctggcatgaccaagtgtaagcatgtcaatagacccatggctcccagcataaagcttttaccaagatagaggaagccattaccagatcctaaataatattgaagaatgattgggtaactgaactttctcccaataactagttcaaatatttcttttgatgtacatgtgactcgtactaggatgccactgttcaggtcttagatacataaaagagctataggaagatggttactctatgactatgatgatgctgatccggcagattctcctttaggcattcttcctcaagatactgctttcattttggatgtaatctgatatcttgggaaagaagaagctgacatcaagcaatggcagttgcaatgcgtgaactcgtatggctaaaatagtttcttaaggagttaggtgtttgtaaagagcaattcatgaagcttgtgtgtgataatctagcttccctgcataaagcttcaaatccaaggtttcatgaaagaataaaacacatttaggttgattttcattttgtgagggagaagagccatcctggagctgttaacattttcaccaaaattctttgaagtccttgagttaattatgtatgaaacaagcttgttgcatgactcttatgcaacaactttagagcaagtaatataatgttcttagaatttgagtttgggcctaactcaacactaccaatctggcttgtaaggtgagggatgtccaccacttatatactttaatttggtcgtttcactagtcgatgtaggatctccaacacacaccgctcatgccaaggactagacatcttgagcgtgaagtttgcaagactggacatctgcggatgttctgataagtgataacagactaatagcaattggcatgataggcccaacaacaatcgctaagataacaaatgttattataattattagaatgttggaaagtaaacattaagaattgttatatttggttcatgtcctttgagcaatagtgccataggaaatagcttaaattcatttttttttgtcttgtaaatactctcttgatgtatataagtatcatacatgctgactgctaaagataattcagaacctttcttctaaatttgggccattctctacattcaagttttattaatttttataactctcctgccctgcttacttttctgcaagtgtggttagatttcactttttgtttttttggattttcatttttttgatcaggttggtgttgataacatgtgtataatcgtagatgctgtgaaacggcaaccctcaggtttacctgtagaggaacaaataagcaatgcaatgggtgaagttggaccttcaataacactggccagcttatcagagattctagcatttgctgtaggatcatttgtttctatgccagcatgtcgtgttttctccatgattgcaggttacagatttttctcctctcaccctgtactttggacaaaaagaaaactgaatcgacatcatctatacacataaaaaggagggtgaaatatacaactcctttaaaaagtggttttaagatttcttaactcctgaattttcttttttatagctttggcggttctactggacttccttctacagattactgcttttgtagctttggttacattagactttatgagggccaaggataataggattgattgctttccatgcgtgaagttgaatccgccctctgcggagcaaaatgaaggtacatctgagttatggcatgtatacattggttttctgctaagcctgcatcttacagtttaggcttttgggtattagggtttcaaattggtatagcctttatgaccatgttgtcaataagttgatcatttatgctcctattcttatgcatctatgatgggcccttttgctttgtctacgcttcaagcccaaagctcgtttgcatgaggggtttacttggacttataaatcattcttgttactctatctaataagccttaagcttttaggatcgggttggtctttgacatgatatcaaaggctccatgtagtggttataaatttgatccttgttgtccttttttggcttgttgagatttaatttcagcactacgtatgaatgttatgtgatttgtcaatgcttcaacttgaaaggactctcacataatgaaacatcaaacatgttaaggatataaatcactcttaagtctccaccttgtagattaaacacattcacacagtttatatctaacatttccattgaagcataatcatgaattattttcagcttctgtaggtactttgtattttaaactttttctctctccttgcttatatatggttctaatcatatcctaatcaaagtgtaggtgttaggcgggaaagagatggattactgacacgatatatgaaggtaaagttatatttagttcatgagttgattatgtgtaaactaaaaaatgatttttattgtattacccatgttttatgaattcaattttgttgttttctaattttatttggcggtcataggcaaaaaattctcaacataacgccatataacttttacattgttagagtggattagctagataaataggggggaatttggatggaatgggcattcagttagttagaacatttgtaagaaaaagagaaatcatttgtgaaagagaaatcctaaattatttacatatttacaacatagataatatatagtgttagaacttaaatgtaataattttatattcaaaatagataaaacaacttaatcattagtctcgtgaaacaaaattataagttatatgagtatatgaaacctctattttggaagatggaattgaagaaatgaaacaaccaattagagtgcatgcattgaatgagtgagtgacaaatagagtagtggaataatccataagataagctatccttcaattccttttcatttatcaatttaagcttatatgctcttcgatttctttcatgagaattggtgaaagaaaaggaaggataaataatgaacattgactcgtgtgattattgcaccaattcgttaatggataataagattcatattcatttgagattcatcttatgatacaaattgctagctagctgaatcacatgattcaaatcgtgaattgtaatattccaataattatgatagctgccctatcaggactagttagttagttagttagaggggattaatcatataaataagggagaataagattcgaaggggcattcaaagaatttgaagatttgtaagaaaggaattatcctttgtgaaagggaagcagcccttggacaagaattacttttccttgttctgttcagtttcaatccagaaaaattcactctttatttccatcttgtgttcctatcaggctatcacttttctgatcaaaattaactctactatcatcgtgtgaatttaggaggttcatgcaccatttcttggactatggggagttaaaatcttggtcattgccgtatttgctgcatttaccttagcaagcattgtaagtttcttgggaaacgagaaaatattaattttcagtaagacccttttcggaaatgtcattctatttgtgctttaattgtttccttttattttgacaggcattatgcacaaggattgaacctggtcttgagcaacagattgctcttccacgggattcctaccttcaggtttaagtttctatttgttttcccatgttccattttgtactagccagcctcttacattcattttttctttcagggttatttcagtaacatatctgagtaccttagagttggaccacccttatattttgttgtaaaggattacaactacaggttgattaattttattgttcttagcgtacttatctctattaattgatgggtcttttaagaagacaattcaatgttgtgttatttacaaacttaaatgatgcattaggcatgcaagctgctgttgaataaaaaaggaaatagaattagtggaaagaaaattttgtatatcattattttcctccactgtgcttgcacgtgaaaaatctcttatagatgtatcaattaagtgtattatctgaacttttgaacttatttcctgtgagtctcttgtgcagtttggaatccaaacacacaaaccagctatgctccattagccactgtgattcaaattctcttttaaatgaggtaattcaatggtcaagttcttcaacaagtgattattagtgtcaacctccattcattagttctagtaaaaactgaatattttattgattgcttgagagaaaactcagtgaaggaagtgtgtaaatgatagtaaatactggaaacaaagaactctaagactaagagattgactgagattacatcaataatatctaaccaatcttaggaaaaaaatatcaaatacagaaataaaataaatataatccccccaagccgtgtcatatatatgtaattctaggacctcttgaagacttggtaaaatgtcagccagatgatctttggagctcatagaggtattgataatgccaaaaagtatcttctctctataaagtggcaaacaacttatgttgtcttctcgtgaaaaaactagatttaatgagatatagggcagattatcacaaacaagctcctaagaccaaactcttaaaacttgcaagtcttgaagcaagtgttttagccatagaagttcacatgtggggtgagtcatggtgcaatactctacaatctagccacaacattctgcttcttactcttccatgagatgattcctctcataagaacacaatagcctgaaattgaatggaacatttgtcactgacatcttttgcccacttggcatccaagtatagtataatatttgtgacccctagccatataaactaggccctttccttgtcaccccttaatgtaccttagtccaaacaactgcattccaatgacattagttcaagaactggctaataaggctccccctgattaggaagaagcttcatattttggtcgtttgggtatcaaatggtttacaatctagcattcctgttttcttcatgtgtgatcgctgtacccaaattgcaagtgttttgctttattttcctaaaaaattaaggaaactcctcatgaaagtcatatctacaaaaggaaatatctctaaactaaaactaatctaatttttatgggttttccaaaaaaaaatattcttttgtggtttatttttgttcaatttttcctttgaaatcatgcacataaattcataaaaaatgaatttatcatggtgcaaactagctgtgctcacactgaaggtagttttgctcatgaagatggtaagacccttccttgcaacactggtaaatctttgggcctaagagactatagagaagttgtttttcatcagacatgttaaaaaaaacaaaaagggaaaacatattttcaatcacagccaaaaaaaatgagaagatggtgctttctaacagctgcaaaagaggcagtattaggacaaatcaaatcctgaaacataacagggagtggccggtgtcctgttctgtggtggcggtggcaagtggtgtacacacacctgaaatgcatggctactggttgcgtgagtaagggaacatggcagatctgatgagagctaaaactttgggtccccatcagcgacgtccgctttgctggagaaacctgctggaaaaaaaaaaattccagcaatggcagtggtggataatggtagcattttctgggctgtgggcacaatgaaggtgccaaggtgaaaatgaaagctacctaagatagctgcaatgaaggctgcctaagatagctgcaagaaggaagctagtcttttgatgcatcaagagtctgatacctacttgataaacctaaaagatttgaaaaagaaagtggctataagagtatagagtatacttactcttacagtggctgaagtttatttcttattcagcttattacaaaggatgattaccactcctatatatagactacgttacttttaattcaagaatttcaagggactaaaaaaatgtccaacactcaagagtctaagaatcttttttttttatcaccataacattgatgcagagtatccaccagttttactaatgattaatctccgccggagaacctaactgaccacctttagtagggtctcccctcccaaccacatttttttcatccacaaggctcaaacccgagaccttgcttaaggggaccgagcccaggaccactcggacatacgacttgttggtagagtctaagaaactgtacaggctaacttatgaaagaaataaaccctattaattacaataattatattcttcatttatattgttgaatggctgacttgtacataactacacttgtaatgtaatttcatttttatcttggcatatatgaatggattctgtatatattgttctgtaacattgcagatatctagagcatcattagtgccaacatcaagctacatagccaaaccagctgcctcatggcttgatgattttcttgtatggatatcacctgaagcttttagttgctgtcgaaaattcacaaatgattcttattgtccacctgatgatcaggtatgtgcttctttaaatgtccttggataatatttgcatgctgcatgctcaactttccttctctcctatatgttttgaacttatattcatgcacattgtatatgtatatatggtttctcttttctcctgccttgtttttgtatctacatcaattgtataaattataaatctaattaaatattgctcaatgtaccatcgtatatttttcgtttacaatagtaaatgtctgtccttgttcagccgccttgctgtttaccagatgaagggccatgtgggttgggtggagtgtgtaaagactgtacaacagtaatatacttctccctctaaacttttttgtttattacataggacactactttcctaatagatgtgactgtaaatcaaaagggtgaattagtaaagcgactgacacttttggttgattcctagtgtttccgccactcggatttggttaatgatcgtccatctacagcacagttcagagagaagcttccctggtttcttgatgcactgccatcagctgattgtgcaaagggtggtcatggagcttacaccaacagtgtagatctgaatggtttgaaaaatactcactccctctttataaaaagacaaaacttatatttatatttgctgtaacattctcaaaattgaaaatctaatatgtagattttgcttataactggatttcaggttatgagggtggtgtcatccaagcttctgagttccgtacttatcacacaccagttaatagacaagtatgcagtgtgataataagtgatgatcttattttctttgctttggcatatttttttcatacatttctctgtttgttctaatgaaaatcttgttagggtgactatgttaatgcaatacgagctgcaagggacttctcggcaagaatttcttcatctttaaaggtttggacgtcaatggcattatgcatttttactgagttgttttggcattctggatcaaaaaatgttcggaatatagtctacacatattttttctccttgtaattattattttttatttgaactgcatttatgagccttttcctaggattgactctactattactgctattattgttattgtgttatttctgtctttcaccaatctaatattttatttgggagtccttgttttcacttgacctttgagtctcaatctctgttggtattagctcatcactttttatctgactgtctctttgttggtattaagtttataacaaaatattagatgatatgattatggatctacttaccattttctcatccttatgaagcattttgtaatgactaaaatcatacaatgtctcatattgttgattcttttgtggatcaccacttcttgttgattaagtttctcttgtgcagatggatatttttccgtactcagtgttttatatcttctttgaacaatacctggatatatggaagttagccctgatcaacattagcatagcactaggttggtattccaaaacagtttaaataacacatgcacacagtatgagatactcgtttgtcaaccttgttgtataagctggactgtctgttatgatccttcagtttcccttcctgtttgcagtttatatgttgaaatttaagcctttattgagaagatttatacttgtgttcttggcttcaaacttttaaattctatctctatggtctttgatggagtactctgttgtcttatcaacatcaaaccactttatgttttccacttgaaagatatataggatcttctgttgctttttatgtatgaaagatttcagtatcgggatttagactacatattcatgggttgtacttatttgcctccctcttgatatttctgattggaccaaaattggaaagtgaaaatctaattcgtgtcttctcacttttttccatgttttgttttccatttctcggacataaattcttcaactactacttgtgtgaaaatgtatcatatcaagtctgtgtctttctttagtcaaattcgtttgtcattaaataacttatggtgatataacaggtgctatttttgttgtctgtcttatcatcacatccaggtatactgagccttgtatatttacagtcaacttgaaaatttgttctctccagttcaagattaagcataatattctttttctgtttgctattaaatgcagcgtgtggagttcaataatcttattacttgttctgatcatgataattttggatctcatggtaacatttatcttacagttgcaaattcgtttcatctttcatttgctttccctttcaatatcctatttattacctcttagttacagaataaaacaaatgaactttgtgactcctgcagggtgtaatggcaattttgggtattcaactcaatgcggtgtctgttgtaaaccttattatgtcaataggaattgctgtggagttctgtgtgcatatagtacatgctttcatggttagtctgattctctgctctatgaattgacgggtcttcccatatggtacggtggtctttttgaggaaacagtgatatttgtcaatgtgtcactttataattcctataacatgtgaaattcaatctgctttgtcaccagggaaatattgacacactgatttattcagggagaccttttatgcaattgaaccacctgccttttggtgactatgctgtatgcacattttctgatgatcttgtatacatgtgttcacaggtaagcttgggggataggagccaacgagcaaagacagcattgtgtaccatgggggcttccgtattcaggttgactgtatgtatagtggcatttggaaagatcatggattgtaatatttgtagccttaccccacccctccccaccccactatgtgcattatttttggccatatcactggtcagtgggatctttaacaccccctgttacgcagaggactggacatcttgaacatgaagttcaaaggactggacatctatgggtggtccaataacagcccgataaatccaacaacaatcgctaggataggttctcataccattttaaaatttaggtttacactataggctctgttaccatgttagaattgggtttgatgggtggataatatggtaggtgacccaataatggaataaggatagactcttgtaccatcttagaattttgagtttgggcctaattctatctcaaaaccaggttgtaaggtgagggttagtgttaggctacagttctaatgtaaggaaataaatggagtaaataggataataagtctctgcttattctcattcactgaatggtatttaaagataaatacatgcagaggatctgctgtggccaatcagggcccctttgcaatagaaaataacagaattagatgctgaatttgtggatgaggcagtgagaatattcagttgctttgtctttatctgggctggtattacttgtagtcactgaggtgtgttgacctcttgatggtcctcgttggtctgctggtgttctctgtaatagcagcgttgctatcagttagtggattaccccctaattatatacactattttgaccatatcactagagtgacaaaacttgaggacttccggttgacaatgcatacccatatgatgttctaggtgaggaccttgtttgtgttcctgggtggtatatactataaacccagttggaggccacttactcggtggtatgatagttattattttggaaacaagtttataggttgacagggccactaaggtggatgttgccagtgttttgttattgagggaggcactagtttctaagtttttggattagatcacgtaattttcgtatgtatctaaatatgtatttttacatgtatcgtatcctatatgttttaaaataattgaaccacagtaaccaccgtattggatgcgtatcaaatttgtgcatcaacttgtaacataagcataagcttgagggagaatattaaaagatatgaaggttgttagtggtgggcctaggctagggtttgggcttgtactggtagttctaaaactcggtctttttaatggtataaataggtgcatttgtatttgtgtgtgacatcttagtatcaatctcaaaatacattgtttgccatcatttgttctttccccttttcctcgtcttaaccctaaaggttcagcaaagatgaaatgttatgcgcatgattaaaagttcatcttatagtagttatttagtagtgtagctttgatataactcttgatctgttgtcagagaattgatgcaggtataccatttataactaattacaaaaatgatttgaatcgtggttgaattattagtgtctgcctgcactattattttgttgacactttctttttgtattatttatctttgtttggtagtggaatcacacttacaaaattagttggagtcctcgtcctttgcttctcaacatcagaaatttttgtggtatgtgacatatcacccttggctccaaacttgattgtctgctcaagaaatgttaaagtaccttttgggtctttgcaggtgtattacttccagatgtatctggccttggttctcattggcttcttacacggtcttgtgtttctacctgtaagtttgtggtgtttggtgttgctctataaagtataaataactagcttttcattaacgtcaggaaataggttttgcttcgattccattttgcgagttttaattgttggtcacacttggcattcaatttcacaatgtgttcaacaagccttacacgtttgacattgtcattaatccatacaatccccactgggattagttctgccggtaggaatgaaagcactttacctatacggcttatgttcaattcctactgccagcaatcctctttggtggacaatctgttaatatttagcaccactgtaagcccttgctgaggcttgtggtatgttttgaccttatataggacagcctacctttcccctatatgtaacatccctgattttcgatttttcggcgactcacattacggtacttcactcaacatccttgttaatcagaaccctccgtaggtagccatttccaagacctcgaaaatgagttctgtttatttctaagatcaatgactgatcccacaaaccaatacaagatttttcagtgtattttgtcctcattcacatgctttttgggaaatttcccagaaaatcactcatctcattactactccaagtgaagcacgcttaactatgaaattcttaagtgatgggttaccgaaaaatagatgcatcttgttggtatagatagtaccaattaatttttttaagtcatcttcaattgtacagtcacatacctatacagttttcggatctctctttctagtgtgattcgtcgggattctacactatacctttttattcccaaaaaatatacgtgcacaataactaattagaaaacatctcacatttcctgcccttttttttcaggtggttttgagcttgtttggtcctccgttaagatatacagtcattaaggagcagctagaagacatgccttctgcttcatcagaacagcctctaattagatgaaagttagattttaactacgtgatcacatacttaatgaacaagaaaatttgttttgattatagaggattaatattatcttttcgtttgacttttagatcgagaaagttcattgcttatgtatctgaacatggtcacggagaaactctgctgattttttgtaatttctgatgtttggtaggtttgatcatcagttacgttggtgtgtatataattccgagaacatttgctgatatttgaagcaaatatacgtttataaatattcatatacttttgtttctttttaattattattaattggctactgttatcattcttaaacaatgaggataccaccaagaaaatcaacttatataggattgttttactttaatcatgataaaaattacgtgaccaaatttgttatggcgctgttaaattgtctttagtattgatatcactacacgttgaacgaaaaaggaactatatgtggttgctttgaggagaacggtctcattttgatgagatctacattcaactcaagtgtagttcaaattgctaaacaaatatgtatgtcgttccatgaaggccgaacatttgtttgagtggccaaacggtaaaacaaacatacccatgtgttctaacaatcatcaactaacaattcactttccattcagatttctaataaatggctctaacaaagtagtcagtgaagctatttgcaatgtatgacgtgtttcattttttcacctatttttttagtatgcggtataaaatcaaaatatttgaacattcaaataatataaatacatcttattgacatccttcatttatatctatttttctcttttttgtcatactatgttattattattattattatatattcattaaaataacttaactgaaaaataaaactaaatgtttaatataataaattaaatcatatttattggtattttttcaaaaaatatttatagcaaattaattttgtccatctaaaaatttgaaaatttgattttagtccctaaacaaattttatccctcaaaatacaaaatattgttttaagaaaatgtataatttttatcaaatgtttagcacattgatatgattgtcacgggcaaaagaacctaaataatacaaattaaataaaaaattacgcatttggggcggttttgaaactatttacaaatctggggcagtcggaaccgcccagaattgggcagcactggaaccgcccaaatccaggtggtaccaagggggtagaaccgcctggatttgggcggttccagtgctgcccaattctgggcgggaccaattcgtgacacgtgtcagtcctgcacagatggagcgatgcatatataaacttcggacggtcataacttttgactggaatgtccgattgaggcgaaaccggtggtcacgcgttcgaaattgagaggagaaggcgctggcaagtttccgaaggggacttggtcaaaaattttctcaaaaaaggcttctaagtgcctcaaaattgggttttaatcttcgaacatcccaaaattttcttgttttctaatttttaattatttattcagttaattgcatgctattttttatttttttcattacttctatcaatttcaagcatttcgacatatcgtacacctcgatcggacatttctattaaattttttttaattttatatgattttatttaatatattttggattttttgtatatataatttttaatatattattttatttaatataatttctaaatttttatatgatcttgtttgatattttttggattttgtatatataactaatttttaataaaatattttattcaaaaaaaaacttttcaattttatttttgaattcgaaaaaattgaatatttttttatacttctcattttttatatcgagactaaccccattaaacacattattctcatcactctcatcatctctttcatcctctcataatttgataattgtctttcaaaaaaaatagaagacaatttcccttttctctttttgttccagtcaaaagcacgcagtcgattaacccgtcatagaaactacactgaaactcagactttctgtcaatcggtgactcaattgtataaaattagtgtggccaaaacatatacatccaagcgagaaagagaattagaaaggatcgtccatctttcatggtgaatgatcaattgtgtgagtaagttggtcatcatctttatctctctgggtaagcgcaatgcaattctttgcatttcaatttgattcactttgtctcacgcagagccactcctatttctagagttctgcaatgtttccccgctccaagtgcgctttggaattaatggggtgctacaatcccgattattgtgtggtgagtgcactttgggacgaataaataaaaattatattaaatatcaaacaagatcatataaaaatttagaaattatattaaataaaatgatatattaaaaattatatatacaaaaaatccagaatatattaaataaaatcatataaaattaaaaaaatttaatagaaatgtccgatcgaggtgtacgatatgtcgaaatgctcgaaattgatagaagtaatgaaaaaaataaaaaatagcatgcaattaactgaataaataattaaaaaattagaaaacaagaaaattttgggatgttcgaagattaaatcgcaattttgaggcacttagaagccttttttgaggaaatttttttgaccaagtcccctttgggaacttgccagcaccttctcctctcaatttcgaacgcgtggccaccggtttcgcctcaatcggacattccagtcaaaagttatgaccgtccgaagtttatatacgcatcgctccatctgtgcaggactgacacgtgtcacgaattggtcccgcccagaattgggcagcactggaaccgccaaaatccaggcggttctacccccttggtaccgcctgaatttgggcggttccagtgctgcccaattctggacggttctgactgccccagatttgtaaatagtttcaaaaccgccccaaatgcgtaattttttatttaatttgtattatttagattcttttgccgattgtcacgtgtcaaataactttttcatttttatttttaaaaaaatatttttatttttataaaactttgaagtttagttttagcctctataaaatttaaagtttcattttaatcttcataaaattcaaatttttgattttaatcctcataaaatattatattttatttttttaacataacatattaagtaatattaatcaaaaatagcatagtattcataatttaataatattattggtagggtgaaaatgaggactcacaacgtacatactcatctttgttactagcctacctaaaattgtgttaggatcatttatgcgtgaacccaaatctaacatgatgaagaccaaataagatatgtgggataagaataggtcaacttgatttactaacgtaatatattaatattaaatgtataattaaatcgtggattaaaagaactataaagtttaagtaaaatatatttgaaattataaattctttattattgattaaaatttaatctttaacatactttttattattgattaaaatttgttgaaaaatatgaaattatactttaagtgggtctcataaaatcttgtaattttcaataaaatcaaccaataataaagaaggatgtatttaatagagtgcgataagaaaatatattgctagcatctcttaatcaaatatgtcataacgttgaagtttaacgacacactagcaatgattctatggcaatcatgtaaaaattaaattgaattcccttccaaaattttcagtttattgaatcattattctttaagaaatcgagccgcaaacagtttcaagagccgacttaagtcccttccaaccccacatcatttcctttgtattaggagagagaaacaatctaatgcagcgggattactttatttatatgaatataaatttgggttatatatagatatatagttggatggagcaactaatatggagctttgtgaataaagtgtagataaggtaatgttagaatttgaagaacaaattaagtagaagtaatagatataaataaaatgagtctaacaagtaaaagcaaagcagaaattaatgcaaatgtgatggtacagtactaaaaagaaacgcctagggtggaagaaggggtagcggtggtgtggggaaaagtaaatgtatttggtagaatattaagaggagaagcttgaaagagggcgagtctaattgtgcggctctgagatgttgtatgcaagtctttacactcctcaagatcaccatcgcaggctaaaacaacccactccccgtcatcatccaaatactttagaaccacgttgctgccgttgctcacatcgtttaggttgaagcgccttgcgatttccagctgcaattctgtgaacccccaatgtgcttgcaagctaaaacggattttttcatccgcaaaagtagccttcactctcaagggttgttgagggctttgtgctgctactgctgctgctgctgctgctgtaggagaagatgagttgttgttggacttggatgattgagaactcaactccggaaaactgttgtagaatgagccgatctgtatggcaccctcggcaccctgcacggaatcgatcacaagttgaagtttcttcaaagagtggcccaccttcttgattttccttgaaggccacctcgttatgccatgctgtctgcatatccttttcagagttgtgggacacactgcatgcatgcattcattcattcattaaacaagagctagagtagagagagacaaagaattaatgcaattattaatggatcatatctctcaccgccaatgctctttgccgcatcttttaggcttcctgcaaagtactgtcttagaacggccaagctcatagtcttctcggccttggttcgtctcttctcgcctggttttctgccacgcttcccactaaatgtgtgtgtgtgagtgtgagattcttccccaaacacgacctggtcatgtgcctcataagtactggtggcagtactgtcccagttgcagtagtgagttgtggtgactttgaactcctctttgggttcttcttccaaggacacgcacacacctttgtgttgggcctgggcctgggcctccaccatgtgtgcaacccaggaggcctgagatggggattcagtgggcaagaatgcagaaacatgatgatgatcctggatgagagcaagatggaaggtagcgaggcaagcttggtgaaggagaatggataaagagttgaggaagtggttgtggtcaggggagtctcggggaaggaagaactccaagacgaaatgaaaagaggcagtggaagtagttagaggaatagcgacggcggcatgcaagtcaaagagggtggcgtggtgagagagaggatattcggcgttggagaaggcggttatgtcggtggcgaaacagggcttggctgttgcgaaggcagtcccaacaattccttgtccgcggaaaaggtgatgctgagagcaggcctcctggaagcccaagaggtgggggtgcccttcccccacaaagcacgctctctccacagtcgacacgtagttctcatcccttgaatggccgcaggacttggcttgttgctgttggacgcatggagcccatgccagagccaaaggcaccttctgcgccttgcacacacacctcaccacctccatcatctctccaactacctcatcctccatttcaatctggaggacacccaggcatctcccactccctctttccaatacaggaacccccacacatccctcataagggtactcgttgcttctaaagaaccgaagcttcaccttcatgttcctttcaaaagcaatcgaagccgactcatcaggcccaggcccaggcccaggcccatgttcatggcctgtgctcctccgcagtggaacccatatctgaatgttgttgtttgtgtattctctcaagtattccagcgcagcctctagtctgtctttgacggaggaagatggccctggattagcctttggtccaatccaccatgtcttccccatgggcatggcctcgctgctcccactcgtttctacccagcaaccttgtcccagcaactcctcaatcaactcttcttcacactccgaccagctcccaaacgcgccatactccatctccatgcttcctcgatcctatcctatcattttacatttcataaaacacttaattatataagtttaatcacccagaaagaggaggagccatcaagtgctaactcaccttaaacttaagattgcttgatgagaaaatatgattacctcaactcagctcagctccactcgacatgcgaccgatcgacaagcctcttatataatgaccagaaaaggaatggaaactctttctttcttctatttcagtaggacccaccgttaagcaaaaaccagagagtgccccctcagtctcacatctctcaccgtgtccggtatttatttatatatacatatttttcccttgcttatcactgctgtaaattatacaattatatccttcatgtatactatatactatatgctctgcttcctgtattacaaacaacacccagcaaattaaaataaaataagatcaagtcattctcatgatgaaagcaacatatagagatgaattcaagttactgggtatgtttctttgagattatttttttaaaataaaaaagtattttttttacttaaaaagtaataaaattaaatataattttacaagttttcaaggaaaaaattagtttattattttttataagttaaagatatttttcatagaaaaatatattatgtaatatattcttatattataaatttaagccttcacttgaataaaggttttttaagattcatcatgttcgctaaatcacataacttctcctgtattaatttttttttattcctttcaaaatttattacttaaattcatttttaaatttcacataaaatcgaaataaagtttttttaaaaaaaattggacacgtattaaattaatagatatagaaattgtgttttatttgaataattgttttcataattttctttttaatatattttttatctcattaattatgtatttctatctaattggactattccaccaagttgattaatcatatcaagcgtctatgtcttttaaactcaaaacttaaggaattatagtgtctatagttagatacacacagactgggatacaaggtaagggttgaatccttgcatatggctgaatccttaaagagttaaagatgacccagatcaagacaaacaatcattatgccatgaatgcaaagaacttaggaccaattttgctatcctaaaacctttttatcacgtgagtaaggggtcatacacacctatacacttacgtaggagtaatgtgatacccatcactccttgtatatatgtaagtagaaaacgatgacaaaatcataagaaaacacatgatataaataggtgtgatatattctcattatcacactcaagttaagtagaatagatttcattaaggtttcttgattctttttaattggaaaaattttcaaagtgtgttttctaacatgaacactaatataaaataagatatttgttatagtaatgaaaatatattattatagtttattgtaattttctgtctaaatcaatcatagatattttttattagactcaattacattcgagtcaaataggatcacatactataaacaataaaatcatttatttaactatttaacacaattatatatctaatactggaattcatcaagatctcttattaagttgaaataacttcatatcaattaattagtgtgtttggtggtcgcagtttattgtatttaagatacataattttatcacatattgaatataaaataatgacattttttatttaccaatttaaatacttttgttttaaaatttactcaaatataaaatatccgtaaatacatggaaaagtaccttgtttattaactaaagaaaactcaaagcaacgtaccttacttgttataaaaaaaaaaaaaaaaaatgattgacaggagtgttgggggtgctagggatgtctgtctggccattaatgaattgaagtaagctaaagtagcacctctttgtatgtataatatttaatatataattatgcatgaccggctgtataatagtgggagatcattaggatgaagaatctgcactacagtctacagcaccattacttatgaccaaaacaaaaagaatatatagagagaggaccatgcttgtgcgccacatgccaatcctacagcaaaccagagatgcgaaattgcttaaagtggcaccacatcgccgaaacaaatttatgcttcattcaattttacccatacaagtggatcgcaacaatacttaagcttcattcgtcgattcggaattcttagattcttttttaattaaaaaaaaggtcataatatattaattctaacgtccaagttgaggccgcgaaaattgaaaaaagattcttctctgtttcattggtgaattcattgacgtaatatgcatctccaattcctggctggctagctccatcaacatggatgcttgggcccttttttttatataaaaaaacgtaaccttatttctcacactttttaagataaacagaaaatgtaaccttagagagacatttttaatcataaatgatacttaggacatttttcttttttttcctccatcatattaaataatatatttatatttattccttaaatcatttcatagattcaaaataccttaattataaactcgctaggatcaacctatataataatagattaaaacaatatacatgaaataatagattctaactttgtgcgatcattttatatatatatatatatataataaaaaaataaaattgatcagtagcaagcagtgtccattgtaacatgaaagaagaaaaaaaaatctagcatttggaatataatattgagattgtctccacctacgagctgagtactttttgctatagcttgaactgttgacgttgtaaataaattttacatgtataaaaacaataaataaaaatcatatatggagaaggatctataattctgacatgtgtcgtgaaatgggtcaccgtacgaacaagaccagccggacaatagagtttaaattacttttcaaccaacgggatatacaacagggataacttcttagctcgcagtaattcgtaatcgcattctttcaatgttattgcgaaagctacgttttatcgttcaaaaaataataatcagtacgtttttgatagaaaatatgtacagtatttaaatataattcataattaatgttaatttaaatatattttaagtaaatttaattattttaaaattaattatatcagaaataatttttatataaccttaaaaaaaaatcttgtcaaacatattctcgtcatccttacaaattagaactcggttattctttattctgcataaccatatttgcctctgataaggattgaatatcaatttacgattacaaatcaccataaaaaattatagaataaattatacatatttttttgagatttaaacaaattatatatgtttctctttatgtttaattaagaaaattatacatgtcttatttttgtttttaaaatttacccaaatcttcctaaatgtcatttaaatatttgacaataacaagttatatgtattgataattatgacaaaaaaagattcaaatatattttttgtccccataaatataaaaatgttcaaacaattttttttgtttatttttgtcctcacacaacttaaatttgttactttttcgcttagagctaggtttgaatatatacaacctaagtgtatgctatgataaaaagtgttaggtttttaacttttttacatccaaatctacacatatgtcgttgtaaaaagtgttgtatttcaacttttttacattgtgtatacatataagtgatttaaaaaatttgaaaattttaacaccttttacaacaacatacatgtattcgaacctagttccgggggaaaaataacatattcaaattttgtgagtacgaaaaatagataaattgttttgcagtaacgaagtctgaacattttcatattaatgaggacaacaaaaatattttagtcttttttaatcaaaattatcaacgcacatgaattattattgtcaaatatttagacgacatttaagagtttgtgtaggttttataaacagaagaaagacatatgtaatttccttaaatctcatgggaaatatgtgtaagttaaaaaaaacatatataatttccttaaacatgaaaagaaacatgcataatttactcaaaattataataaagaaaaatgaagaatgaaagcaaaccaatttaatattcataatggatatcaattttacttcttctaaatcctaagatacatacatatcatagataaatatgtcaattatgaaattttgtatttcactttttaataattttatatattatgtatttaataaatataattttttaaatcaaaaatacatattaccttgtacaattcgaacaagaatgttgaaatgttttttttccatttttaatatatattgtgttaattttgacatatattaataataagtttaaatatatttttgatccctaatatatgttcaaatttagtgtttgtttcttaaaaaaaaaatatttgcatttgctcctcatacttgaacaattttgatactattagttaaatgatgacatgtccattaaacatttgataagacgatttgtgactactctagaaaccatcataattcatttcaaaatttaaattacaatttctgacaattaaaaattgctaaaatcaatgaaagtaaaaatcaaataatttttttggcaatgactccttcctcggcctaatccatatccctccattcataaaatgggcaactggatcataaaaattacttctgctaccaaatatgctacccatatagattagtatttcactctagcattgttttcatttcaattaatagcgaccaatcaatcatccaaggggaactccataatagacgtaagagaaatacacttagagggaatgtaaaaggttgaacaaccaatttaaatattggatgcaaggtgacaaagcgatgcaatcttcggtggaggatgtcttagatctaggtttcgaggcgaaaaatcatgatcttggcattggactaaacctgagtggtgtcgatggggaggttctacttgatgccgatgattgaacttggacaacggcaacgagatagttttgctcaatgttggagatagtggtaagggagaagccttggcatatgaggttgtttctagagagagatttatttgttgatacaaatctcaagggaacaaaacttgccacactagtaagggaaggtggcctcttttgcatgtgagctttttttattactttaattgattctattggtttttaaaccataccgccaaaagttgtaatttcattctataaataactactgttagttttaaaaacaccacaaattatccttcaaaatagctaatgaacatgtcattacttaacttatggcagagatttaaaataaaatttttcaaatatcagaaagcaaatacgaagaaaaaaattattaaggagcgaatgcaaaattcaagtatatattaaaaattaaaaaacatatttaagccttaataatatatataaaaaattgaataatatttttttatatataacttataccaaagaaaaaatttttttacaaaataaaaggaaatttttagtcctacaatgaattgaaataaatttatccattgaaatattattataaagtataagaatgactaaattaacaatttatcaatcgttgtacttgactcatcactctaactggctagcaaagtttgagtcgaatagtttagaacctttcgcgttttggtcctcttgtaccctagaggcaattagtttgtttagttatgtttttctgtgctttggctttgtatctttttcactgataaaaaaaaaaaaagtacttgactcatcactttttaaatgtcaaccttcaattcatttgttgctaaaagttattttcttttagtggatgtgtgtgtgactaattaatgtgtatttgtgtttattaaatcaatctcaatatttcatcggagttactattgtttacaatatcccgataaattaacataacacaaattttttacaataagagatgtgatacaaatacaaaaattcatataataagttactatacaacatcatttttttctatctttactattttcttatttattaaatttaaaatttaaagtatttctctttatttctgttggttcattgattgtacactttgttgtataattttttatacaattattattttctttaagtaattaaaagtttataataaccagaaaaatcggaggacaaaaattaaacataattatatttacatatagtaattaaaacatattttaacttttttcttaaattttcttttcaccctaatatgtttaaatataattttgatttaatataattagttataatattaataatcaattgttgacgcaatcaattattaaaagaatttatttttaactaagactaagaaagcttagcctactttttgtcgaggtgggtcattgttaatgcgcttacgcatgtacagtaattactaattagtgaacggagcaaagaaatcccttttaacaaataggtcggcccacgaatcttcttctttcaatttctgatgaattaaaaataatataaaaatttgtatgataaagagaaggaaaaatatatttgaaaaatgaattgagaactagtgcaacaggaatacagcacattaagaacacacacaaaaataataataataaaatacagtattaacgcattgaaattaaagtatatgtgcgtagagccaacctagcctacaatcgaataaaattgaactgatattagttctcactaactttgagcaatttagttcttgtactttaaaagaacagtgatttttatcattcgttacaaatactataaaaagagacaaaatctactgctttttgtaaaacttaggatcaagttgaccaagttaaaaattcaaggacaatacagaaattaaaaatatattttacctaaaatttaattatagttacagagtttaaaagattgagccgcttcttcattttggcgagaaacaaaaatagtttgtcataaactggatgtactttactaacacgtgtatcatagataacataatatataagtttagtattattttttgtttaaaaataatctcactttaagacttatctatgcgaataagaagttattaaatattttaattttaaaatataaaattgctctattatattagaaagaaaatgcaaattaaccctttaaaaaaagtctttatattttgaaaatatgcaatatatcttctccattaaatttttccttagaaatgaataggttttgtagattcgcacgtgactcgatttattccaaaattatttataggaaaatataaattactatcttgaaatttgaataatatatgatttaggatttgtttgttttatattaaagaaaatgtacttattgtgatagatttaaaacttagtgagtttgagtaaaagtattgatacactatttagtataattacaaaaatatttgccatttatgtaattaagcaaattttgttggctttttcattatttctataggaagattgattccaatccggattgatatttgtgatcttgtatgaatacattaatccttagttttgggacatactattaaattatattaattatttaaataaatattaaatatttttttactacctcctcatatgcatatttacctttttatcacaaaataatttatgttttagaaatacaatctaatatttttttttcttcaaatatatccttatttcacgttaataaccgtaaatgcgtgatagattaaagtattaaataaagatattttagtctaaaatacaataatattttacattcattaaatatttattaactccatttggatgacaataaaataagtattaaaaaaacatctatcgattataattaaatagaaaagtgtcattcaaccaattttacttttaaaagtgttagtattattatatagtaaacggaaagcataaccttatattagtcgaaattcgtaagagtatttaataatataataatcataatgattgatgtttgatattgatggaggaaagagggtggatattactgtatactgttgatacttgatactccaatatattcttgacacgtaattgaattcccaaagttggtgtctttctgtttacactcacaaatcacaaccaaaaataactaaacaatgaataatttcgtgcgaatcactttcttgaattgcgataaagtttaatgcaaggctgacttatatgctttgtttgcttcagagaataaaaaataataattaaagtaatgtgtttggacgataaataagaattaattttggttcataaaattatgataaacatggtgaaaaagttaaagaaactattaattacttcactattattgtgattttttaataattacgttagaagtgaatttaaaccaaacatgctattagaagtataattcaggaaattacgataagggtaagttcaaacaaaaacaagtatttctgctgttccaaaataagtttggaatatggagaaaaaaattattctaaaataagtattatattatctttttaatgtaatcttaattatttttattaatatttctaataaatactattttaatttttcatttaatatttataataaaattaattttataaaattaatatactatttcatttatcttttaatttttataaaataatctaaaataacacttattttacaagtctaattcctagactactgtaggaaaaaataaaatcaatttataacgaaagttatgattagcacgtcatttcataggctttttttaaaaactttttttgtcgatttaaaaatttatttgatcttattattaatgtttgataaataaattattttaaaagtctacaatttttttttttaacttgcaagtaatacttttttaaaatattaatgtctaacttttagttttcatattaattatttcgttgttcttaaaatatttaataatatttttttattcttttctgtatataaggtaaaacttttgcactcataagataggttttatcttttatctttttacgtaatatatgattttcttatttttatctttttattacgtacatattgataatgatagataatgagttaatttattttattattaatattttgatatttttatattacactattttaatcattatactaattacaatatttgttttattatttttgcatcatacttcctgatattactagatgataaatttattttttattttatttttgaaataattttgatattatactatttattttaatcattatattatttataatatttttctattaaattttaacttcaaaatattttaactattaaactaattaatataacaaaaacatgatgtatattgaaataacgtatacaattttaaatttattttacatttgatagaaaatattttaagatatataattacattagatgaatataaaatatgcaatataaaaaaatacactccattctatctcaattataagaaaaaataaaataaaactattctcatatttattaagaaaattagttaatttttttaaaaaaattaagaaaactagttaaatttattaagttatgtcaatcacaattaaaaataaacctttttttcttctaaactacctttattgaaacttgatatgaaacatttaagactaagatacactgatatttttttttcttatatttgagactagatagagtaataattaaaagtaattgataaataaattacaagagtttaaaattaaaaaattataaggacctcaaaatatatttttaataacaaaagtaaaatttatataaaaatacaatgcaaacatgtgtatttatgtcattttatattcaacacttacttcaataaataattttatcaaatgcttataaattaataagttaccataacaattttcactttcaagcttttaatattaacttttagttagtttttaactttcagtttttagcttttttatttttatttttatttttagctaatcttgcaaaacatagtagacatatctaatttttttttaaaatcataaaaaataaaacctcaataattattataaaaataaattaatttactatatataacaatttataattaaataataatataaaatatttacactatcaaattaaaagatgaaaaaaggaaaattttaaaatttgggaaaacaaaactagtaagattttttaatgagaataattacctaagaccaagttaaaaataaagtgagaactaatctaattgatcaagtcaaacaaaaaaaatcatttttaataagtagtaaattaatttataatttttttctatatttaaataaaaatatttcagtaagaaaattaaaaaatattaatctttttaaatatcaacaaaatatacaacaaaatgttcgttgtcttttctctctattttttttcattcttacacactacagtataacttctcttgaatgtacgcatgatccgtatccaagttttctgattagattattatatttgtatacctaatttttgtttcatatcattttcatttcgctttttttttctttttcattatattccttatccaaactattaatttttctattttgtttaattttctctttaatttttttctttcacccataactttttcctatttttatcagaacataataatcaacattaataatatttttaatctaaactaattgaagtccataataataataataataataatggaccacatggtatacgtttaatgatgatattctttttacgattgacacgtccacttgcatctttcaatgatttgacatgtaacctatcgtttttcttcactgacgttagaacccagtcagatgctgtggattacaactgaaatttagacacccaacccacttgttttcctcttctggtaattttcacattatttaattggataaatactattttaattcatattgctaacaaattatttttttgaaaaatataaaatttaaattttattttcaaatatacaaaaagtacatattaatcctgttattaacataagtctgttaactttaacattcctatatagtatatacatgacacttttcaatgaaaacgtatacatgtttcttgctatatcaatgaacagtcagggagctattttgtcagaactaatgttttccatactactcattggttaatatagaagtaagcttgaattttccgatacatataatgtcaaaatatgcctcataatctcatcaaaaatataattatgaatgaaattaatgcgaatctaatgcttagaatcggtacttgaacttgacacaacataacattttttttaatagagagggcaacacaaccattttataatacacttaaaacattaacactatgtaggatattatatataattattttttatcctttactttttttaaaaaatttttttataaacatgcatcttaaaataaaatgacaaccttttattataacacctcttaaaacgttttccttttcaatatgttacttctctgatgagatatttcttttaacatctactgaccataaaactaaataaattaactttaacatctttctatttctttcccaatcctttcttctattttttttaccaagaaatacatgactatggtctccgtatataatatatgtccatgtggaaaagcaagaaaattaaaataatggcaagtttattgtagatcgactggaaggtgcttacgaggttccttgggatcttctccttgagttgtttttcctcgagttccaaattccctcgtagcgaaatagagagattaggctctagaaactatagatttgacattaacacaattttagtttagtatttaaatacttttgattgcaatggaacatgtctgatcaacaggaaaccaaattaaactaaatttgagcatgccggcaatcagtttcaaggggatctgcttaattaagtaatataagtatgcatggttacgagataggcaatcgtaaggctttagattctcgcattaaatcatagatacagtttcgctatgtatgttatggatttccatatcttatagggatcttatcaacaattatcttttattctctctatcttattgtttgatatatagtctttttcattagctataacagtagaatagtagcctctggccaacccataaactaacatacgccgttgattcaaaccaatttttccaaatcccgttattatttaatattagatgtttgctttaatcgcttcttcagttatcatcttcgacggcattaattaataaagggtgctgctgtatatgaaataatcgagcccagtctatacatgctttggtcaagaaacaattttatgtgagactcatttctatagtctataatttaaataaaaactgatgaagttctactaatttattatatgcataatgcatgatttaatggcaccaccctgaaataaatatattctaccaataagggaagccccacttctattatcttttctttggatttttggaaactttcaataatcttttttataaaaaaagttcaaataatttaagcttggatattactagcttgttcatgcgcaaaaaaaaatgatctcagttgtattagttattaagcaactcatatttcgtcaagtaattaagatcttgaacctgaaatttgaatcaatggcatttttcttttcctctgtttttttaattgagttgaaagtcaaacaatatttattcaatttctctcaaatatctgaatgacactttttaaatgcaaatgtcattgttctttaattttcccatatatatagaaattttaatgggtcccgcgatggatattaatgaatccgtattgcatctgcattagatatctgatcctttgtaattgtattttattagtgagaagaaatcctgctctacgtgattgatttcatttgtattttttcccttctttaattactttttaatcttttttccttaattaattgaaaaatccatcatattatgagggacgtaagatgaagcgggtagaatatttacaacaattaaatacatttgaagcagatctatattatcaaatcaaacgctcaagtttataccttcaaaaccaaggaattccttgggctatagattcgaaacgatctattcatgatatcgtatccttcattgcttcagtgcttcagtttatatatatatatatgataataaataaacggacaaaatgaaataacttcattgcttcagctttttatatgatgtcctcaagtcttttagctaggttgatgaaagtgaccacactgatactgatctagcatggaagcaaggttgaatacttggaaagacacacaacatttaagttagtatgtatatcaacaacatgacaatatatggaatacaatgtttatctagtgatattaaaaatactttatttataattctcggatgcaggtgagttataataataatgccattcgagctcatcagccatctgataatcctaatagagagtgagtccttttaacaaaaatatcatgaaacacctgacgtacgtgaagtatgtgaacaagtgatgaggatactttgcttttgaacatataattataaaatgcactatgtggtgcatgtaggctttgaatagtgtattaggccttaaatttgtctcccgagtcccggccctataagggatttgagtggttagaactatcctgggtttgatcatactgaatttggcctaatagtgtaaacctcaaacaagagtccaccaaacttggcatgctgataaggaaacgtgacaaacttgtcatctaggatctttaagtagcatctgaacctctagtaaagaactcttgttgctttgacaatcgaattagttcaatcatgttaaaatttgaacctttgttaatcatggtgtagtaataaacctttgttcatctgagcatcggtgttataatgatttgagttaccttttcaattgttgggtgacagttaatgctagttgggcatgtaggacactgttattggtgtccaacccttgagttttaattcaggctggcttcactatgacgcatatttaagagttgttttattcgttatatatatatatatatatatatatatatatatatatatatatgcaacaactaatgacactgatgaaaatattaataagtcccaatcttgtatttgctttgaaaaagggctatttaatttgcagtttttttgttgcactttaatctttcaaatttcaaattctttcagaatttttaattttcttcggtttccctcttttgttcacagtacttcttccattctcaagagaccaggcttgcctccaagagcgtttctcttcattattcatttgttcaacaaacgttcaagacttcgatcatcttcgtaaagtttcacattttatgatacaaagtctatcttccttgtctggcctatgtgctctccctagttcttttttcttactttatttaatttttctctattaatagtaaactcacggtatgcatatgactagatatccctagaggtgtggtaaattgaatccttggcgagtgagggaaaagtctaggggctagcttcaagtgactttgattaacttcaattttgcagtccttgaccaacatatataatcacgtttgcaaccagtcattcatatatatccttttactattaatactttaatttacatgtatgattatgtccttgtgacacttagtcctttacgaaggttgttgatcagtgagtcacgggggtggaccgtggacgcccactttatcattgtttttgcacctattccaaactcaaacgttctctagtcataagtagagatgggtgactctacattaatgtaactaccaaatgtcaacattgataatgtatgactaacttgacttttaatgatttgtaatgtacttctttaatttacgaaaggtttgtaatgtaattatgatcatgtgtaagtttttgttgcttcatattgcttatgaagacagatagaaagagacatgcatagagtgaaagtgagatgaaagaaagagttgacgtgtgttgaccattttttttttacattggattgattttgcattaaaaaaaatgaaaccaaataaagttattgttttattatttagatatttttataatgaaatgaaaaaaaaatcattccattcccttcaaattaagatggaagaaaaagaagaaataataaatgaaatggagcaaaatgcatttttatcatatttcttttaatttattttaaacaaattaaataatgaaacttaattgttgtttttattttttaattccattatatactcgtatttcacccttaatgtgaatccaaatatagtctgaattgcacttgtgaaaataagatgcagaatgataggaataattcacagttgaatagaatacctttaatacgaaactaagtaatgtgagatttcgccaggcaatagaaaataataggctcgtacgttccatccatccattgatccattcgaaaagtctactgttagtttcccctaaactactacgaatggtcgtttatgctgggcatgcacattttttgatcttttaaaatatactcttagagaagctgtccaacttcatttcatcttccacttgggagataagcataccaacttctcaggtatccattaaatattatatgaaacttgaacataaatgacgatggtacaatacaaactacaaaggttacatccacatatcttgaattgataattattgttaatgttctagttattaggagattcatatttgtaagtactacgaaggagacgcacaaggttttaaaatagtcgcagttggagtttcattattgcaagaaaatggagctgaaatgactgcaattgtaattggcatgtggtcacaatgagtaaaaagagacttaacaaatgcctttaaaatcatggatagagatataaatgtttataaatagaaaatgaagatggtgtgttgtgaaggataaataataggagagaatgaagccgacatgctatttgttaagaaagaaagaattagagtggaaaagtataagtgtccttgcatgctaaaatgtagagagaatgaatagatcgatgcgattattgcataaattggaaaagtaggtagaggtaaggaaatgagagaagttagggataaagggggagagcaaagagagtgtagtctagagtgggaacctcaaatcgagagtgaggacagagagagaattggaagatgatgagtcccagtgacagcgcttgttgcaactcgctttggcgttggagttggagttggagttggcaagctggagcagacaggcagcgacctcgtggtcttcctggctcatttgttgttgtctcctcaccacattgggcggaggattgatccctctccagtgacgctccgggtggcatctcatgtggccgaagagtgccttccaagaccagaacttcttgccgcactccgtgcagggtcgtgcctctgactctgaccataatgatgtcttccccttccaccctcctgcatcctccattaaccgcttccgcttctgcttcttccgggaacaatcagactccctcttcattcctcaattcaatcaaagccttttccaatggaaccgcatttccttatgtacctgcctcacggttactactgcaactcctctggcggtttcttcttttcaactttttttttttttttaattcttttctattccctatttccatagttcatttcaatcatttcttttaactaacttgtcatttcactattttttttaatcttttttcatttcatattatttaattatatatttttttcatctattaaggttacataaatataatattttcaatagaaatctttaaatattaattaaaatttaatatcaaaatatgtatatgtttcattagtaatacattttaattttatttatattagcaatattattatcaaaatgaacattaaattctcattatcatgtgtgtgtatggtttactaatagagacaatgtctagtacaacatgaggtggtttttttatatttaatttataagctttcaatagagatatttcgttggatgtaatgatatttatttttaaagaaaaacaactacaaagatgtgaagcttgagtgttaaaagttaattaaactaataatcatcaaagtttaaaagcgactattatatgatgttttgaaatataaataaatcaaataggttttacaaaaaagattgtattaatttgtttgaattgatttaagtataataaataaatttaaaactttctcataaaatgaattaattacttaatttaattaattgcgatttaagtaatcatagtatacaagactatatacttgagttcaattgaaactattgattatttttatgtattatatttataacatttaatttaaatattataataacttcttaaatgacttagtattataatgttcaaaaagctcataatgctctagaacgagcattattccatcatgattttgaaggtcatcatggattctccacaatcactcctaagttcttggtaagaatgaagggccaaaccttaaagttaacagtccaagattatcctcctctaagaatatacacctaggacaatgcccaacatagacaaggcacaatttttgctcgaatggaataatacctgtttcattctattttaatccaacatattctatcccattatgtttcaattcattttgtttcattctttatcatcaatctaaacatcattatctaataaaagtgtgtgaaagaagacatcactaagaaagcagggaatgtgggctgaggctcgtggtccaactgcttagactgagcccgcacggactacgattctaaaaaccaattttggaccacagaatggctcattaccctgcaggccatgcagacacaggacaaacttttggaccatttaatttgcaggccagcccgtatattcaatcgagaattacacagaatctcccataatgggacgtgtaagtgataatgattatttgctatcggatgtcatgttattcctgattgaaattgtatttgctaaataatctataaagtaataaatggaatagggagcaaaacgaatttagatccctgttcctaaaaaaatgactggggaggtgtttgtattttgaaatgaaatcatataggggtctgacatctcaaatgactgccctgagctctccagtaagcagtgcatgtttgcggtgctgggacaagattggtgccacctgaactgcagtcagtattgatgctaagtcattatatgtgggttccttgtgttcattagctgcatgcagaattgtttgcaagatttgcaagggatctccatggctgacaaccaaaactgcacatctgcaagatgtggaaccgaattatattagctgatagaatatgaataaaaagaacaaaataagaacatctcaatcaaccactggtggaagacctactaggtacctgtttgttttgccgttagaaaatcaatttttgcactttccaataatgtatggttgggattactttcgatacacattccaattacgttttaaaagttcaaaatcaatttactcaacttgaaaacaaaactacgatgcagggcttgcacacattcatgctgaaaaatcaaagaataccaaaagactttacccttgaaattctgattccatagtggccattgcagttgcaagtcgacaagcaacatccttgacactttcccctccttctggcccaagaaatggatctttttcatctatatcccaaatctcttggtactgttgaagattggaaagaagtaatcaatgagttgcaaactacagttggtgtgagaatagtgacaacgatagagtttattagaacctgaacctgactaatgttccaaacatacaagatctctatgacaaaaaaagatgcagagaaagagattttattttattaaaaattaaggtgaattggcaaaacagtaggcagcagaacaaagtgggcattgagcatgacttactttatcatgcgagaggagttcaaaagaaggaccaaaatagcgttctcgaagatcttggatgacctgcttagtgcttagtaaatgagactcgattgagggataaataaagaggcaagttgttggaagggcttaccttacagtggggtccatcaaaagggagattcaagagagttgcaacaacgttagcggtatgggttgttcttgaaaagggggagtagcaaatgcgtacgttagcaagcgggatattattggcctctagttcctgcgcagcgcagtcagggtggcgtggttaattgaaattgaaaattgagttgaggtaccttttggaatgattgtgcagcgagttgggcctgatgaacaccgtcggaggccaattggaattcggggagagtcccattctcctgccaatgcgattcaattcaataactaagaaaataatattattagattggacttgatttaatttaagagaaagcaaaccatggaggaaacgatgatgcctcgctcgttgggaatgctcttgccatgcctcagaacccagtatctgttcttcacaatccacgacatttgatttgatcccttaccctaacctaatcccctccctgtgtggcataagaattcctgttttactttataaaacaaaatgagagatcccttttatttaaaaaatatctagagaggggcatgagtgcaaattgcagagagaacctttggtttttgtttatcattagtcaattcgtctcctttcctttcttttctgagccgaggctgctgtgtgtgtgtgtgtgagagagagagagagatgggggtaagaagtaaattaagaatgtcagcgtcagtggtgcagcaggggatgaaggaaataagaaggagcgtgacgtacatgcctcgaccgggggacggaacgccgcggggggtgacgctgataccgggggacggaattgggcctctggtgactcaggcggtggagcaggtgatggaggcgatgcacgcccccatatacttcgagaagtacgaggtgcacggggacatgaggcgtgttccggaggaggtgctggattcaatacggaagaacaaggtgtgcttgaagggtggtttgaggactccggtgggtgggggtgtgagctccctcaacgttcagctcagaaaggacctcgatctctacgcttccctcgtcaattgcttcaacttgcccggcttgcccacccgccaccacaacgtcgacatcgtcgtcattcgcgagaacaccgagggtgagtactccggtctcgagcacgaggtcgttccaggcgtcgtcgagagcctcaaggttatgtccaagttctgctccgaacgtattgccaaatatgccttcgagtatgcatacttaaacaacaggaagcaagtcaccgccgtccataaagccaacatcatgaaactcgcagatggtctcttccttgaatcttgccgccaagtagcaaccaaataccctggtatcaagtacaacgagattattgtcgataattgctgcatgcaacttgtctccaaaccagagcagttcgatgttatggttagttagtttaattggttactatagattcatcttcccttccctttccaatctaaatctcttctcgtgttattatctcaggtgactcctaatctttatggaaatctagtggctaatacggcagctggaattgccggtggcactggtgtcatgcccggaggtaattgaatacaaatgcaataataatcgttcattctattgaataggaagtaaataaatggttggtgcactgcagggaacgttggggctgatcatgctgtgtttgagcaaggtgcttcggctggaaatgtcggaaaggaaaagatggtggagcagaagaaggcaaatcctgttgctctgcttctctcctccgccatgatgctcaggcatcttcagtttccttcattcgccgaccgccttgagactgctgtcaagcgtgtcatttcggagggcaactccagaactaaagatcttggtggagacagcactacacaccaagttgttgacgctgtcattgccaatctcgactagactacaccttcccatggctatgcacaatctttttcaaatatcctccgccagttttttgtaatcaaagttcattttctattgctatttttcagcagggttgaaggctcaccctataataattcggcttaattttcatgtaattatgtttgctcaaccaaagtcacttgtaacctgtccattgtttgaggtcaatttgctcaaacaaaggatgcttctctatccacataatctgtaatgtaatgttgattgaaacgaacaacactgccttccaccccctccgcttttcacgtaggaacctttttttgttggaaacatgctatcacctcaaagtgcaaggaaggagaaaagtaggaaagaattaataccgtaaaaaaccaaacactgacatgacttagaggtaatttcaattgagtttcaaattcataggctgatatatatatatatatatgatacaaattcttttctgcaggtgatcctctagtccggacaagtatgcttaaaacgaaactagaataaatgtgattagatagtgaaaattatgcaattaaggtcgtgtgtatttatctatataatatttgactaaattaaaccattttcctttacaaagtaacattgactaatttcattgagagaacccagaaagtgcttctaaaatgtcttaaattatctacacatctaaatataatatccaacggagagaatcctcttcaaaatgtcacatccagtgttgcatccatattctccatctaaagactcacgagaccacctgcaaacatgagttacaagatcaagataacaaatctcgtagatatgaatatcccatccagaatgttaagagcaatatcacataataatattaatcaacacagaaaaataaattagaaattattttcctcaatatctgctttaagtgattaagcatgccctagttcaccaataaactaacaagaagcaaaattaactcttcataaatgggcacactgccatgatcatgctgactaatattatctttgctctttctagtgacattgtcaaacaggacactaggctatcagcatcaacatacacattccgacttacaggtaacatcattttcaatcagattaaaagtcaccttgaaacttcagaaaatgagtattaaccaaggatcacagaaggtatacaacaaggccttatcccattagttaggtcagctgcatagatcaaacaaagccaatgtactcaatgagttggagcaaggtctttttgaatggtttcaccaaagatctttctttacctcccttaattgaactatgctcatttgatttacatgatcaaacgaccttagttaagtttctatcatctcttcaggtgctactcctactttatgtccactaatccaccataacattcctcttttcgcaacattagctcttgttagcccatcattgagcggcattagtcttatagttttctggtcacattgtaatcacaaatcatgcctaaagcatttctccatttcatctgaccatcttcaaccctatatgtatacccttcaaactctgcaataaatttctcatcactttgtaagatagatccaataatcttgaaccatgctttccacctccaaaacattactagcttgcttacaccttctactagcatctaatatactccatcaaggaagatttttttctagaaataaccttttactgtttggtgcacaaaatatagcagctgagtagataagcaaaaccaaggacagaaaggtaaaaataataatattattttcacaagtcgagagaaaataaaccccagcaatgatgttaactatactttactcaatcaaaaagcagagacatgataggaattgtaaaatagaaactgacctccgcaatttgtaaatctgtgtgtagaaaccaccaaggaccattctttgagagtaatctgaaaatgtagaagcacaaaggattcaaccacaaaaggggaaaaaaaatttaaaagcacaacctggcaattcaaaaagggaaccacactatctagcatcagcaaatctactgaaaggacagggtgatacactcaattactatatttctttctcttaataagcttggtggagggttagacatggtgttatccctatgttccagatggtcactttttagtcattttcttcatcatatccccctttcttctttcccccttctttgcttttactttttttttcaacctcctcgtatctatcattgggttcatctaccaccgacttcaattagtttgggttaaaggtgttgttaatgttcatgtaatgaacgctttacaatttcactagaagatttgataacccatgtagaagatgtcaactatagacacagattttcaaaaagcactttaacaattgaaacaaggttaaaaccatggcacttatacaccattccataaagaaactataatagtatagtatgatcagtcatgcatacttctatcatataaataccatcagatcaaatgaattgtcagcccaagatgtataggaaaatattctaatcaaagatggataaatagtagagggtgaaggttgaagtagccatctagtcaaatacaatgggtagagtaacctatttttattttaaaacaagatagaaacaacatgaaacatttcttcccaatacacacaaaattaatgtgccattttacctgacagcaccagctgccgcacgaagagccatgaagagaactaagcccagccatacgccctgaaggccaaaaagtggaggtgcaaataccaagaatgcagaggagactgctcccacgaacatctatgaagcaattgtcataaaagttaacctcaagaagcatatgtaccagaagagaaaaatgtgacacatttagaaaagtaaacaacttaccatggagaaagcagcatatcggaaatcagaaacaccataatggagaccatcaaaaatatatgccagtgcattaaatggttgagaagcactgacaaactagcaacaatcacagataacaatgtaattttgatgcagacacagacaaatgcaaacaaatacatacaaatcaatcagcaataccatacataccaatgccagagttctgaccacctgcaagacttcagagtcctgagtaaaaatggtggctaaagatccaaacgatgcacccagaattgcagtcaagcaaatacccattaccagtccaatctggaaaggcatgatcaggttctcaaataatttcatataacttccttatttgacatagtaaaacaactatagcttacataaaatctaagaataactaatgaatgaaaggcatcaaaggctaaaaattcaatccattaaaaaaaaaaaaaagcgcttacccttaatacaaaactagtaacttccttcacaactttgtattcatgtctggatacagaacttgcaataagggcctataaataataatatagcagtataagcaaaaaggcatatacaaacaagaagacagtaacgaagtaaaggccaagcttaaaagaatctatgaatttaaaatgttaaaaagtttcaaagtcaagcaaactgaaaattttcccaagaggttcaaacaatgcacccagaattatgtctggcttttgttggctcgacttgtttcattgcaagacagcatggtatttttactagattgaaagaaatttaggaaattataccacaagggggaaaaattaaaaagataaaatgataaagaaaaatatacaagtttttgtaatggatgattcaatacctgaccagatgcagccaatgcatctgtcagaagggaaacagccaaccacacttgcatacatatctgatgtgcagccatagctactggaccatgtcgagcagctattgatgtccccaatgtcatggttgaaagaacagcaagtgttcttccaagaaggaaaccacctgtaacagcccacagatcataactgaaacatctacaataacctaacagaaagctaaataatatacacagtaaagaaaagagaaatgtgtccatgcaattaaagttaaacatacataaattaataatctctctaaaacaataatttttctggtcccaacttgggccagcttacaaaattagtaatgtgtccattccaaacacacacttgttctcttaatgctaattcctttaaatagaaatattacaaacaacaaggggaaaaaaaatggaggtgagatcttttgcttggaaagtgttttgtaaacagtgtttgagattgcatttagcttttagttgttatcttcccttctccctactttttcaacaaagagaaaatcattttaagaggatggccaaacacactctttcatctcaggttttaacaacacataataagaaagacacaaatcctcaccagatttaatataattgccaaattgcaggtctcccatctttggaggtagtaactcagctcgcttattcagacaccagatcatcaacatggtcccaatatatctgaggtacaaaaattccatcataattagggttgaatcaagtaaagaaataaagaaaaaagtaatgcttttgaaaaggacttactgagagatgactgtggaaatggccgcaccagttacacccagccgaaagtaatacataagtaagggacataagaagacagctgaaaagttaccaatgcctgcattttgaaagaggaattagcacacacatacatacaatataatgaaaatgaaaatgatttttaaatttaatcaatctttgaaagaaagtaaaagagggcaatccctagtgtaatgttaaaattatgccttggtgacagctggtcatgggctcaaatccgaaagcaatctctttccatatgcaatgggaagactgagtacaattaaccttcccccatacctttgggaaatgaggagcactgtggtatgttagtttttttatttttaaaaagaaagtaaaacagcaagaacatttatgatatcaaaatctaaaattatttttcaagattataaatcacaagtagagggcgagtcctggcacagcgataaagttgtgccttggtgacttgttgatcatcgatttgaatctggaaacagcatctttgcatatgcaagggtaagactgcgtacaatatccctcccctttaccttcgcatagcaaggagcctcttggcaatgggatatgtaatttagttataagtcacaagtattccaatcaactaaaaatatcaattccctctcactcttcagcaaacatgctatgataattttgttcattccttagagttgcatgcgagctagttaataataacaataatgtattcatgaattgcgagtaaaggtattagagtacatgcagaaaataaaatagaaaaggtattgaaaaggagaaattaagaaagaaagcaaacacttgccgagacatataacaggagtttttgtatccttaaaaccgcggaaaatgccttgaagagccaaagaaagtacaaccgcaggagcgccaacagctcttaaagagagaaagtgtcgtgcgggaacatatgttggattttgctgttgaaaaaggagaagacaaatgatatactcggaagaggatacaagaaataaaacgcataaaggagagggcgaaaacatactgtaggaacaccaattaaatggagaaaagctccagctcccaggtataaagctaaagcctcaaaaaagccaagggagagtgccaatagcaaagcagtggagacagaggagagttgttgttttgttttggcatctgcagtggaggaagccttggcaatgtcctcggcaacaaaggaagtagcaacacttagaagggggatattaaaaagcttagaaatgatgttaaagatggatatggaaacgccggcagaagccaattcaacagtgccaagtcgaccaatgtaggcggtttccatcaactgtgctaaggggtcaattgcctgactggcaagggcggggagagtaagagatataagctctcgtttgacatccacagaagcagaatctgaatggtgttggtcctgagaagtgaaggaagagggtttagcgccaagtgctatgaacggagcggagaggctggggctttggcgcaggaagtggtggtggtggtggtggtggccataaccgtaactgatatggttgcgcttgcgcaggaagggtcttctggggaaggctccatgatattgatattgaagttggtattgagaggtggtgaaatggatagcctccatgagcatcaccgcctgcactgcaagaaagaaaaaagttcaataatccatcaacatcgaaataaatatcaaataattaggcagactcgactccacctgcagcccacagaacgtatcgtcgccaactaaccttttcctctccctctgcaatacaaatagatagctgtctccgcttcgctcacgttcagctctttctagatgaaattttaaagcactatggattaaattattcaggtaagggatggtcataaaataaataaacaaaaattaatattttgactattcatttggaaattactagttaaatgttattgatttgactaacttacaagttaatccgactaaaataaacttataaatatttttagcttatttttagaaattagaatatatatatatatatataattataaccaaataatcaaatatatcgttttattttatattgttttatatttattgactaggttataatttttagcaattctaaccattgaaagggagggagtatgcagtgattttagatgcggagcctccaaaccagattaaacagatgttggccctttaatgttttaggagtttcttccacatttagttttaatgtaattttctttttctgggtttaggctccgctaattattaaaaaaaacactttctaatcaatcagattaacttatatatcaatatcaaaagtataaaataattttacattatcatctgataaaataataaaatatatgataaatttattaaattttataaaattatcttaaaaataaatattttttatctagcttcaagtgaacattagaaaccaaaaatagtaattcaatttttttaggacagaaatcaaaatcaaaatacttttcagagatcaaaattaacatttttttaagacacagaatatatttgtattgcaaaaagagggattaaagctgtaaagacattgtaaaattagacccaaggacaacagggggattagtacagaagaagaaaatgcctggttttactccccttctatacaaaacccattgccacgctgaggattttatccggcaaagctaacattcattcatgttacttgggatcaagaataatgatttcaatgaaaaataaaaaaaccatttttcttttaaaaaaaatcaaaatcaaaaacttgttcatttaaaaaaaatgtcacttttaatttattacatttttcttttttaaaaaaacaaaatcaaaacttgttcatttaaaaaaaaataatgtcacttttaatttattacatttcacagttatttcattctaaaacattaagttttaaaattttcaaaatatatcatattttaaattttttgttagaaatatttctgttttgttaatttttaaattttaaaatgatttaatgtcacttttaatctattatattctgacagttgtttcgctttggtacattatattttaaaaattttattatgattatttatgtttttaaaatgtgttgttttgatcattttttggtacattatttttgttagaagcgttatggtccaatattttaaattttataatagttaagttagcatagtggtaactaaaaatcatcattattttttatatttaaaaattaaaaatcactcaataaatgaagaaaatatgaatttgaaatcacaaacaacaacaacattcactctattattattattattattattattatattattattattattattattattattatcttcattcaatttaatcatttaataatgataataatttcattcactaatcattctaaattacaatgggtaagggtcccttctcctttcgcctatcgcccctaacccaaaaagatcgttgccccgcccccgcttatgtcttcgccgcaacctccctacgtagccataattgttgcctcacctaacaacaacaattgtctcatcgccgcactgacaacaacgcattgacgaaagcgaagaaaaagaccaacaatgcctcatagtggatgaggtttgaccgatcggaccagtcataatcatcttccaatgaaatgcactatttaaccgctctttgtgctactcgtttttgtctttcccagttgtaaatgttgaatgggaaattctatatttattcggtctaatcgtgcacctaatcgtgcacgacagtggagatcttgctcgcaaaccttacaaagagtcacattatgacttcctcgttcatatctgaattaattggcgagataaggtcatatttttgtctttcgttgaagacactttttgctctgatctcccctgcctttgtttccaatagcatagctgatgaaatgttttgattttcctgtaaagagtataagaattttttgtggttctagggagattatgtgttgacgtcgttcaatctgtgtgatgccgaatattttaccttttcaaatttggaagaggttggaggagttgaaattttttagttgtttagttatttttaaataaaataaagataatgactatttttagtcgctactatgtaaagttaattattttaaaagacttaatgtctcttttggtatattatgttttgcatttttttcacttcgatacattaagttttaaaagttttattttggtcctttatattttttaactatatcattttggtctttttttaaaattaaaagttaacataacactaacgtcgaaaaattgaaaaaaaaaaaaaagagaccaaaaagatacatttaaaaaatgagcataatgaaatttttaaaacttaatgtataaaaaaaaaacaactttaaaacataatggaaaaaatgattaagtctttaaaaagcctgaaatgtttctttcatacattattaatttgataatgcaccctttcaaaataaatttgataattcacccattaactaattgaaatattaaagtatgattctagatactctcaaacattaccttatcttagatcaatattaaaatgaaaaatgctactcagactctcctaaactctctttttaacactactaaaataatatcttcatcaacatacaataaatccgggaaagcctcaaggctccaatagattaagaagaactaataacttgagtaaaattttgtaagaccaatttgatcattttcacatttcactcgtcactatttccatcaattacatctattttgatagatagcttgtgcttcaactcctctctacatttacgaataaactttctccaattttggtttcgtaaccgtaacatagaggaatgaaacgcgagagcgagatcatgcaccacatgaaacacacgtgaagagtagtaaagagcaaccaaattttttgatgggattgcataaataagtactaataaagttaaggtgcagaaagaagaatttgtgccttaaatgttcatcaatcaatgtatgtcgttgttacttgttggcagtgcccacgtatccattaagaaatcacttttctctttccctttgattttcaatcgtaatattacacaaggaaataacagttatcagaaaattagaattcttagtacatgtttaagaatttttttttaaataattatttttcaaaagttattttagaaacatggttaaaaaaaataactttttctttgaaataaactcaagtaaaagcataattttaaaaatttattagttttatctacctgtttattttagtaaaatattttattcaattgtaaatacaatcaataaaaatggcctgtagaaggaacttgtgttaatataatcggagtaaaaaaataaataattagaatgagatacatacatgttatatgtttttcacatcccaatactcaacaaacacactgtttctaatcacctcttattgataatgatcttaaaactaatttatgtaatgtaaatagtgaaagaaaacaaagtggtaagtcgtaatgaaagctataacagagttgtgagtaagaatttgctccaacccaaaagcagaatatatataacagtagtaagtacagcttgaatataacagactttgagttccatatataggtagagaatccgctggttaattagttagagtcaagcatccaagaaacttgccatgcactccatatttagagtttagagatggaattgattgtaaacatttgagtcaaaatcaaacttggacagcgaaaccaagtactcaacgttaaatacaagattaacgcgagcttaattgaaattttggtttggtgagaaagtaaaatttacgaggggattagttggagttggaacttagaagttagatgactcattgacacgattgggttaattagatacgtatatattgttgtatatgcattgtatttgatcgatcattcaattccgcgcacaggtatatcgattttacgtgcggttgcgttcgtttctgttgaaaggtcgtcgtctcttctccaccttcttcaaagaaaaggtgacaaaatggaaaatgcgagaaacggtgtcgttgctgcgaatgcgcttcctcttcttccatgcaatcaatagcattaagcaacgcaatattgatcgaattaatgaaattcggcctaaggtacgtaacgacagcaacagcaatgaagagaaagaagcatcacactgagaaatccagaataatcggactcctggttgtgagtttccttcgaagtcggctcctccaccgcactctcatcatcgccatctccgcatcccttcttctgctcttcgccctattctctctgttcgctccgtccccgctaaatgaaatcaatcttcagactcagaacaatgaccaagttagatcacgattcgaggttccggtaagctattaagtagtaactaaaacgcaattgtcactattctgcattttattttgcttaatctatttgtgttggttggactttgaaggcgggtggaggtagatgcaggcgtgatttatggcgttcaatgcactcacgcctcttctatggctgcagtaatgccggtgtcaattttgcaagtaaagctaatcccaatcatctcatctcgcaaccaatttatgaatttaatttcggactttaaattgaaccaaattgtaagccgtgtgttcattcgttttttattggacgtgcaatttgattgcgtaagtacttgtttcttgcacttgcagatgctaatgtcaaaacgaatccagatcgatacttgctgattgccaccagtggaggtttaaatcaacagagaacaggggtaagcttcttcatcaactaataactatctattatcagctcatatgcaatacctatggtttcaaggaggtaaccaaacaatattggaagatttacctagtctttctgtatgtaaccaacatggatggttcttttctttctttatctgaaatatgtcatatgctattgctctaaattcaattgatatgatatgagagttttgtctggcggggctatcagacaccaatataatatgtgatttagggatacaaatttaagtgacatgaagaaggctaatttctgtggctggattattggtgcagataattgatgctgtggtggctgcatatcttttgaatgctactcttgttgttccagagttggatcatacatctttctggaaagacaccaggtctgtctttgccttgtaaatcatgtatgatatttttattggaagcaatattcatggtctcttaatttgtgtgctatttttttgcagcaacttttctgaactatttgatacagactggtttataacatttctccggaatgacgtgagaattgtaaaagagcttccggatatgagagggaacttcgtggctccatatacggtgcgtgttccaaggaaatgcacccccaagtgctatgaggatcgtgttttacccgtgctggtcaggaagcgtgtaagtcttcacatcctcaaaattatttgcctgcattccaccattaaaatctggacttttcctcccctgttttgagcctagatgctgcatgcctttctgttttttttttggtttattttatctatttcttttatagaacttaatcttgccaaatttataactccttaaatgcactcagtagtataaatatttcaaattgctagttttgggtaattttttctcttacgaactgaaatcttttgttattttttggcatataaatagttcaggggggaaaatattcctattcttttccattctgttgtatatgaatatcaaagcctcaacgcattttttttattatcaactatagtgcacgtttggttatatattaatattaacaactaatttccttatttttataaaaaaaaaaatcaggaaggtgaaaataaatatttgtttcttaaaataatctaattcaaacatgcggactttactagtgaaagttgcgttaattttacggttgagcaaaaatagttaattttactaacaagtatcttgtactttctatagattatttttaaatatattaaaatttaaatttatttaaaattataaatatacataatttattaaaaatattataattaaaatttaaaagaatagaagttaagaatagagtgtactaaaagattaatgcacttttaagtcggagttttctaaatgaatatgtatgaatgaatttacttgaaaatatatgacatttgatatgaataatgtgagtagagcttttaatcataaaaaatcgataatcgatttttttagtagaacatttgatatttgattaaacatataaataaggaacaataaactaaatgaagaatttatggaacattgattaatcaaaattgaaatttatttaagcaataatgacggttgactctcaaggaaaatacaataaggaaattatcttaagtagtgactggtgagtctgtaaaaaaagtagtgacacgtagtagtgtcttggaaatattatttaaaaaacaaaaaatcttcgaagctatcatatactgtgacaattgctaatcttcaactattgtaataagtacgttatggtggtgttcttgattcgatggatgatacttgaattccttgatgcatgcaggctgttcggttaactaagtttgattatagacttgctaatatgttggatgaagatcttcaaaggctgaggtgcagggttaattaccatgctctcaaatttacggattccattcaggggatgggtaaattgttggttgagcggatgaaaatgaaaggcaagcatttcattgctctacatttgaggtaattaagctttaataattatagccaagctttatttctggttcatttagttcctcagcaaagaatgcaatatgcagcatgatatcaacgtcagaatttcatcagcttctttaagttataaaattaactcgcattttgtaattgagacgctaagttcttttcatttttcatatagaagttcaatgtgattcaaactgatgttttatcacataggtttgaaccggatatgcttgcattctctggttgctattatggcgggggagaaaaagaaaaaaaagaacttggtgaaattaggaaaagatggaaaaatttacatgtaaggttttttttattaattacatgtaaaggttttagtagcatctaagaaatgagctccacatgtacgaaaattgattgatatattctctcttatttggaaatgggagacaggcaagtaatcctgagaaagttcgaagacatggaagatgcccacttaccccagaggaagttggtcttatgctaagagcactaggttttggaagtgaagttaacttgtacgtggcatctggtgaaatatatggaggccaggaaacgttagcccccctgaaggctcttttcccaaactttcattcaaaggagaccatagctaccaaggaggagttggcgccatttgtgtcattttcttctcgcatggctgcactagacttcatagtttgtgacgagagtgatgtatttgtaacaaacaacaacggtaacatggccaaaattttagcaggaagaaggaggtacttgggtcataaagccaccatcaggccaaatgcaaagaagttgaacctgttattcatgaacagaaataataggacgtgggaggaatttgcctctcgagtacgaacattccaggtaggctttatgggagaaccaaatgagttgagacccgggagtggtgagtttaccgagaacccatcagcttgcatatgtaaaaactctggtggtgggggaatttcctacccccaaaatcacaacagtattaccgagtttgaagagcagcaggagtggtctgaggtagcagataataagctcaatgccaatggaactaaaattgattcactccctcttctaatgaccacggaccaattagctgaagtgcaagaattcttctccgattaactctgttatctccccaatgatttcatggaccgacggtattgaatttgtacatatatattcagcttgggaaaaaatgtagactgtaagtagcaattgtatagagtttgaagcttctagaaggaagactcgttaaggcgttcgtttgctttgatcatagtgttaactgttcaggatagcagaatcgtcagtgttccataccattttagatatttttaaagatttagttgtacatgtccaaaaaatgaaatttacaattcaaaaactcttttttgtctttaacttgttttttcttgtgtggctttggtgcctcgcacccggagaaaacttgagttttattgtgtgtggttttctaaacgcacttggagaaaactaccggactatccacccttctggatttgaattgactctgtggcccagtacttgcatgaaccattcgtcttgctttgcctttctcatgggctttatcatagccttttattataccttcacttgattagtaaatttgtcttttttttcgattggtttaattaaggagcactttgaaaagccatatttacggcaatttctactttgacgagaatgtaaatttttttactaacaatatatgaaaattagactcttatttttataccatcattttaattaaaaatacatttcccttgaaaaaatatgttggtgatgtaaataaacaaaaattcaagattgtaagactcaaaaacatgttaaattgttttaaaaaaagaaaaaaaaaagaaagcaagaaaaaacaattaaaatctttttaattgtttttaaaaaattgatattaaattactgatatatccttattacaagtgaagagatgatggattcttttttccaaagatttacggtataagttgctaatgtactcatacttaaatacttagtgtgagtgcattagcaaactcctatacatatgtgataatttttaaatattaaaaatatttaatgtttttcatttaaccaaataaaattttattgtaaaaaattaaaaatattcttttaaaaaagctgaacgaaaaaatttatcctttacatgatagagaatctcaaacaaacaaagcattaatgtttaccgcagccacatattatggtattgatcccatttatttaaacttattttttaccagagtgtttttattgataaaaaagtttttttttgctttttttaaaataaattatatatacttcttaaaaaattattttttttaaatttaaacaattgacttattattaagtaattattgctatttttgtgctatttttgtgttctttttggtaataagaaaaatgttatgcataatcatccgttgttagtggtgtaattttttttattgacaaatgttattggttaattttattaaaacgttaatgaaaaagatttgtctatcatggcgtggcatttcatagctgaaagaatgccttcttacagtttaatctgtgaactgaaaaaaatacatttcttcttctttcaccatgttgtataattaaaccaacaaatagtttcctacttttctcccactaattatttttcctaggagactttgtatgagtgtttggctctacttaataaccactaccaaaaactgacaccaatcatgaaacccatcaatggacaatgacaatcctttgaaaggtgacgacaagtcctttcaagttgggaccattagcgtaactatgaagcgctttggtgttgccatttgcaatccaatcttattggctccaacaccgcgaaattatcaaaaggattaattattttttaaatttatcaaataagaataaattttaaattaatactagggaaaaactataacatctttaatagtataccttaaacaaaatcttgaattcaagattttctctatatctccaattaaaagaggtgaagagatctctaacacatgaagaattaattcttataaaataactcttacaatattcacattgtttaaaaaagaataagtttttccttgttctttctctctccttaaaatctcaaaataagatctatcaaataaaaaattagaaatatattaaaagatcttcaatcctatatagttcgatgggaactatagaaaagtgatcgattctaatttgagatataccattaaaaatgttcttactacttctaaaatcaaaatcataaattaattcaaaatttttatttttctattttttactaaaacataaaaaataacaacttctgatttttttaattaagactttaaagtcataaatattttaaattttttaaataacatttagaagtcacatatatatttacgacttcaaaatcatacttttttaaaaaataattattaataatttttaattatttttaatttttaatttatagttcaatatttttaatcaatatatttaatatttttgttactaatattaacaaataattttaacttaaaatttatcacataatattaaattgtttttaaatttttaaattaatttttaactttatcattaaataaattaataatttcatacagtattattaaataattttatttgataaaattattttaatattaacaatagaaaatattttaataataaaaataattgttaaaataaaaataacataatacattaatataaaatgaacaatacaaactaaatacaagcataaaattaaaaagtacaaacaatattagtcatcaacttacttgtatagatacttattataattatgtctttgagttctaaacaatgagtttttcttaggcttatttgaaattgatttgttcatcttattatatatatgattaatgattgacattcacaatgtgtctagtcgctttgaatgatcaaatataaaatataaacttaaatattgaggtaatttaaatttatctttacttccactttaatattttttatttaaatttaactctttcgtttacattattttttaaatttataaaataaataataatccttaaaattagtaaaaaatataaaaaatattaaaacaaatagtatataaaaatatagaaaatattaaataaaaaataatatataaaaatatagaaaatattaaataaaataatatacagatatagaaaaaggtattacttgaagttgtaaataaatatgtttatgacttctaaatagtatttaaaaaattaaaatatttactacttcaaaattgtaattaaaaaaattaaaagtcatttatttttttatgatttcaataataaaaaaattgtgaattaatttatgaatttggttttaaaaattgtagaataccatgcaacttacccctttgtgaatattaatttaaaatttatcctcatttaataaattccataaataattgcccctttgttaatttcggcccccagcccccaaactcccttacaatcaaattgtactcagtagttacattaaattatgaattaacacatattctaataaataaagtgcatttatgattaatagttggcttttttatattataaaaaaattatattactttgtttaacaaaaaatggttaagttttttatttaaaaaagttgaaaattactatattcgtctattgaattaaaagtgtttaacaaaattatttattgtaactaattaactataaaataacatgaatactatatatgatattttaagtttatgaacaaagatatagtagtaaattttgtaagattaattttttattaaaaattaaaataaagaatgtaaataatttaatttttttaaaaatgcaatactaaaatgggcggtggtggtgaggattcgtgaaaaaatttagataaaaacaagtattataaagatgaaaattaaggtaaataaagaaggttttaaaatattaaagacaaaatgaaaataataaaaaaaatgaactcaaagtcttaacttttaaaaacataataaaataataaaataagttaatttattaaatatttttattttgataaaataaattataaagtaattaaattaattggttaaaaaaatagtcatagtcatatttatatatatgtatggcttttgtttttggtacagtatgtatggcttgtttggtatagaagatggaaataagtaaatgtgtcagcagttcatttagtaaatatgactatgactgcatgcatggtggggactgagtgggtctgcattgcatcacatattcacatattcacatgtgctctgcacgtgagtgtctgaacccgtacgtacccttctttttcctctctgccctcggctattagtatcacttataaaacacaatgcaatgggtttatttaaagatttaaattcaacatgaattaaaaaattgaacagtgtaactaaaacttttatagtaatagaaaagacgggggattcgtataaagtgaatcacatgcacatatacttgtaccaaacaaggccaaacataaaaaacatgaaaattcatgagaaagcctttgtgggggccattgcaattcatgagagcaagagcaataacacatttgaaatttggggacgctccaagggaccaaggctctcctaactttcccacattcctatgacaacattatgattaaaatccttgccccatcagctcagtggaaagaaaacaagttcctcctctctctgctttcatgaccctaaaagattggtaggcctatatgcaggtgaaaccacattttaggatttttttttaaacaattattgaataaaaataaattttaaattaaaatttagaaagagaaaaatcataaaatatctcactatttttgacttgaaagtaataaattattttataatttttttattgaaatcgtaaaaagatttatgattttttaatttttttaaaaattttgaagccgtaaattatatactaaaattgtaaataaatttatttatattaatattttatattttagtatattatattttttatatttttatttaatatattttctataaatgaaacactaataaaataaagttgtgaatatatgtgcgacgttaaagtcgaactagttggaatatactatataattagaagaaaaaaaatccttaaaattaggaaaaaaatatagaaaatattaaataaaataatattaaaagatataaaaatattaaataaaaatatataaaatacaaaaataaaaatattaatttaaagttggaaataatttactaatttaaggtcgtactcaaaaaaacttaaaacatcataaatttttttttaccacttttttcgtagaaaaaaaataaaagttgaaaaatgatttacaattctaagctcagaagtcatgaatatcatactacttactcctttctcgatatttatttaagtttatctctatttcataattaaaaaaaaaaaaaaaaaataccctgaaggttcgtttcgcccttatccggatattctccacctgatcccatcctctcttttacttctattttttctaaaaagaaagtgtccaccttcgttttcacctccttaattaacttttatgtaaaataatttaataacataaattacatttggcttgctagttttcttcttgacctataatacatggacatcctttaattataaatacctatataacatcttttgtttcttttcatttctttttgcagtattgcattttttatcatctttatattttttcgtcaaaaatgaatctaggatcccagaggtcagttggaacaatctatttaaaaaatgaatttaatacataaaaataaggtagtaagttcaaacatataaaaataaaaggtgtccgatattaaattttaagataaatatttatgattttattaaaataaaggggtatatatatttgtttaccctcacatgacaataagtgagagggttcaaacatataaaattaggtgatgcaatatgaaaaatataatattttaaactaaatacatgtgactttattaaaataagggggtatatttatctagcttcaaataagagtcggtttgtcgttgtttacaatgaaattgttttttctgttgtattttttcatctcaaatatatacaataaaaatacaattttatcgtctatttcgaaaacagatttatatttctattattgtttgacaggacataacttttgactcatgttcaattttagcttatagtatgtctatttcatgtaacttttcgagatgaatgtatggcaagtacccaaattctaatatatttttttttttaagaaaccttccttctatgaaaaaatggacttgaaagatttaggatttggagtttggagtgtaggcatggcagcgggacccgaacccgtaggtacccgcccaaatccgccccgattttaatgggaaaaaatcgattttttctgatttgggttcgggttcaggtttttcctggtagccaaaagcgggggcggggcgggggcgggtatggggttactgatacccgccccgccccgcccccgcccccgccccgtaataaataatattaaaaataataataataataataaaaatattattttctaattttatttaattgaattgactgattttgttttgtaattttaaaattatgatatcatattttaaatgtgggtttgttattattatttttttgttacataattaacttttttatccgattttttaataaaaaaattattttattttttaaattttaattaaatagcgggggcggggcgaggcggggaaaactcgacccccagcgggggcggggatggggatggggtttaaaattcgacggggaacgggggcgggggcggggagctggtttgggggtgggggacgggtatgccccgccccgttgccatgcctattggagtgtaacgaaaaaagaacggagaagggagtgggggtgttgtgagaggatggtgatggaaataagggaaaggttttgggtgtaggaaagggaggagggtaacaaagacaatttacattttcttggatgagaatatagcttattttgagagactataaatttgagagacaacagcttattttcttgagtcttgacctataaattacattaataatcaacaccgtcttacttaccataaattacatttgtcttgctagttttcttcttgatgtataatatatatgacaccttttaattattaatacgtcttaaatctcactttaaataaagatgaatatattaaatctcgtgtaagtgattgacccatatacataatattttatcttatattaatatatacaatgtcgaatgtctacccaaaaaaattatacaatgtcgaataattaactcatactcgtattatgttctcttaaaaaaaatgaagcaaactaatttttttcaaaaattaaaattaacttatatacctcattttttataagttggacgagtttttataaattttttattcattttatctttttattttatttttttaataagtgcttactgaataattttacccaaaaagacttttttaagatgatttttgattgattgtgggtgtaaaaactaaaactttataataagtatttggacaaaattttaaaagaaaaatagaacaaaaggtagggcattcattttcttggtgaataatgaaaaattgaaggaaaaaaaaccggagtgctgcaataattgtctcaacagggatttgagtactggcgaagcttatgatggagtggttaatgcaagcaaaggcatccaatcaacaactcaataatgataaaataaattattggattgggcaatattgattattactgtatgactctggtagcagtaatttgatttcacatttgcatagatatatgattttcgactgtatttatattctccctcgcgaaaatacaatattgtatgtcaaacaaaagttacagaaccgactcaattcaaatacggcggctagtccacaaggatttgcaatattgtaatctggatacatgacatatacgacagaataattatagatcgaatattaactacggattacggaaattccctaagacgaagatgcatgattgttattttctctttgcatgctttttgtggatgctggtagaaactagcatgcatgtagaatttagaaacgtaaattaaacagaagaacattgtgaaaaaaaagaagtgactgatgagacaacgacgtggtattatggcattcaattgttgtttgtttggtgcatacaacacattaccaatcatggcttgggggacccccccaccacacacacttccaaatcacgttaccacccgcaatcaatataatattggtgccgagatttatatttgagtaggaaaatgttgtctctatataacacaatagtctctcacacacacacgaataatatatatatatatatatatatatatatatatatattttaattcttgagaaatagttcattttattgtttaaaaatgcctttagaccgttagcattttaaaaaatatatgatagagtttactgcctggtcatcatggtcataatccattggtgattaatatctctccaatattttattctcatcctatgcacaacactataacaactgaaatcagaatcaatagtttgatcaggtgacctgttcaaatgattatatgaaatttgtggtgtatttaagcatgaggatcccttgtgggtctatatataaagatcaaaagtctttctgttaacatggaagccaaacatgtatttcgttgtcgtgaaatggtggaaagcatgttggcagcaatggataaactcttaaggcctaacaatgaaaggcatattggtagctacaatggatatcagatactctggatgaaaaaatgtttttgtttgaaaaaaaattattatataaaatagactcacacttaaggaaaagaatattgaagctaagatataaaggtgaaatctcataatagataataattaataagttaagcaatatataactaaaaaaatcactaattaatttaatatattaagattttgggttgaaagtgatgttttacttgtatgtgtatttgtgatctaaatcacaaattaatctaatgtcttaagattttgggttaaaagtgatgttttacttatatgtgtattgtgatctactgttgaaaattttctcagagtttttgagtattttatcttccaaaatttcacaacaaattatttttttaattaattattttcacgtttttatgctaaaaattttcttcaaatatcaactgtttgtactgttaatttttttttaaaaaatattatattaaattaccagatatattttagagtaaactgttaagtgtatattctctttaaatatttcttacacaatttatttttgtcaacacaatttcttcaaatttgtatgtgactaaattcacaacccgtagaacaagataatgaggatatgaaggagcagatataaagtgtgtaagtgcgagtgagccaaatggcaatgacacctcacacctattcgctgattggtacagatagggtatcttctcaatcttattggctttcataggtatttcatgtttgttctcccactccattcagtaagtgcccttgacaggatttcttgttggacatctatcttttcaaagcttcatgattcttctaataataataataatacatgggaagctgaccatttggattgttactttaattttattaaaacaaaaagagctttatgagttaattattagtattacacatcatatgaaagaaagaaagaggcatcaaaattgagagaaattaaatagaattgaaatgatataataacaatataaaactaattttttattagtataaacatttttaataaaaattaaaatagtaaaataaatataaatataggctaaattatgttttaagtttatgataaattaatatattttttttgagtctctaataaaaaattattatattatatttctaatatattaaaattttattttaggttgttgttaattaagtgatgatgcattatttttaaaattttaaattctgatttctagtagctaaaaaattatcactatttattttaaaatttaaatttataattttggatagctttaaaatcattagaattaagtaatgcaaaaaaaaaattcctcaaatcccaatcttcatcccataataaataaacgaataacaaattagataaaaaaaaaaaaaaagagttatggttatcagatagagagaagccatatctcagattaaaaaaacaaactcagaattaataacaaataacattcaaaccaagaagtcaagattcaacccaaatcaaagtggacaagttagatagtcagatagaggaatcaaaaatcacacctttacgattaaaataaaaattgattccactgtcagtgacaaaacgccaccatatctgcggatccatttctcactgactaaacgccaaggtaaatccgtttctcagtgggtttttttacgtagcaggaaacaagatttgtttttttttttttcattaattaattctagcggttttaaaaccaccgaaaatttgtcgaaaattataatttaatttttttaacttactcgatatttaactaacagtagagacttaaaacaaaatttctaatatattgtatatctaacttaaaaaatatattagaaattcaaaataaaatttactaatttattagtaactaaaacatattttaatcatatatatatataataataacatgatatactgtattagacataattttattcataaaaaactaatataaattatgaatgtaatattaaatatcagaataatatattgtatatatttttaatgtaatttaatatatatatatatatattaataattaaatttaaattaataaatatattaaaataaatgctcctgacattttccatttacttggtgtttggaaagatccatggattcggtctaatgatagttcaaatgctccatcagttcctctcatgggtctcgaaaatatgaaagtaagtgagttattggatcccactttgaactcttgtaatgttgcacttattcataatgttttttcccaaaatgacgctgaaaatatcttgtctatgcctttacgtttaataaacactcctgctgataagattatttgaaagcttagtcaagatggggctttttctcttagatcttcgaatttttgtatcatggaaatttttttggataacaatcatctctgtgaaagtggtaattggatggctatttggaatttgaatatatccttgcaaaaatgaaagattttatttggagaatagctagaggatgtttcccaaccagccaaccaggcaacgattatctactatggtattgaaaatgattggcattctttcctaggctgcactcatattcaacatgtgtggatggaagcttctttgtggcatattcttcaacatgcttttgatactccggaagatatgcgtaatttcatatttcacatcccggaaaaattcaataacagccaaaagtggagcaaattgttactgtactttggtgcttatggcggagaagaaagggagaagctttaggatggagctaataaacctgctggattgtctctgcagcaagcttttcagcagcttcaagaatggaacacacaccacaaacggcgaaatatacttccacctcaatctgaaatatttgaagaataatatggatgttattttttttaatgaagacaacaagtttggtgttgctgctgcagcaacttcttggttccaaggtcagccaaactccacaagaggctgaatctatggctctcctatttgctatcaactggaaaatagatcagcaactgggtaacattatcatagagacagattgccaggttattcctgatgctttcaaagcaaaaccatttcatgatctcgaagtgggttgcattttaagaatctgtgataaaaaattttatgaaattcataactgtagtatacagtttgttagtaggcaaaccaatcagatctctcataggttggctagagcatcaagatcttatgtttgtctacaaatgtttgatttcagtccttcttgttttcactctttacttattcataacttaatataagtttgcttcattaaaaaaaccatttttcgtttactagtgtatttataaatgactttgtgtgtttttattttattttattttttataagcgtgaactaatattttaacacgtgtaatgcacaataaacatgtttatattatataattaaattttataataaataaattcttttgaaaatttatattatattttaattaaattttataataaataaatatttttaaacatgtagattgcatttaaaaattatagtgaactaatattaaatttaaatgtagtgtattttaatgaaagtgttctaaacgaattgttacataaatatactatagagtaatgatatacatacattcatctattttaaatattttatcaatattttttattttttttatctttcttctaatcatatcaaaaaatttattatacatataatttttctctttttcaactttctctctaaatataagatagtgtcatgagtgttaaccaaaaatgtttcatatgctataagagattataccgaaacttaattacttcgtgttgtgttagttgggttctccttcatctttatgtgctaagtaaaaggatgtgtatttgcatagattctgatgccaaatcaaaatttagtagagtaacaatactgatatatgaattatttatatctatttgaggttgtcatgtagtatttgtagagaatatagacattatgttgtgtgattttgagcttgtcgtcacacatctaatgtaaaaaatccgttgcaaaatacatagttttgtatgtaaggcttatgtttacagaggccgcatgattgacaatcgtggctttgtgatttaaaggagtaatacttaggcgacgattattcttaaaaattgtcatacaagttgtgtagctggtcagtgcaagaggttgattcagttaagtaatcttctgctgagcaaaattgtttgactttttttttttttttttattgaagttgtgaccttattacacttttagaacaagtggtaatacaatattaattatagtattaagacttgaatattccaacaacaaacaatactcaggaaaagtgtggcaacagaggagggggagtttggagaacttttttgcttatgggagaaaaagttattcataacgttaattaattaggcgaacaaatgtggaatcaggtttaatatataagaaatttaagtcattgaaagtcaaaagaaaaagagttggcatgtttaacataaaataagaaatatcacattatattatcaatgagagcttcgcgatatgttatcttaagcaaatcgaaggaaaacaatcaaagaaaataaccgtatggaagacctttaattttaatatgttggtatatataagcatagaaagaatcctaatgaaataaaaatacaaaaaatgcttcctatattagttgtaattaccttaattaactcaaattaaattatattggacaatcaattaattgtccttttatatttgtttaaaatattaaaataaactgtgatgaatttaaagcatttaaaattataaataaatatatagtacataatattcagtaaatatatatctaaaataaattaatgttgatttaaatttttgtattgaacaatcaattaaaattgtggatgtgtatgtcttataatagtaaaatatacctgtgtgaattgatttaaattttactatataaattttatttgtacgaatcaattaaaattatccttaatcattattactaatagaatcatttaaattttacacgtatatttttataatagaacaaatttctatatttttacatttttactcttattaacaaaaaatatatcatatcaatttaggcagttcttatatttactatataaaatttgaaaaaatagaataaatataaaattagaatatttcaatttacaagattgatcctcatatattatatttaatttagaattctataagtaataaaataatataaaatctacttaattaaattattttgtgtgaatgaatatgacgtgtcatgtgatatcaactcataaaataaaatgaaataaaaatatcatatcaatttacacaatttttatatttactctataaaattttaaaaaataaaataaatataaaatctgaatattccattttatactattggtttttatgtattataactaatttaagattctacaattgatttaatggatttaagattttattggaaatagaataatataaaatttaattgaattatttggtgcgactgaatattgggtgacacgtgatattaattcattatcactaaactaaaaaaaaattatcgagataaatgagccctttaaataatttttgacctttcaaaggattaattcttgaaaaaagaatattctacatatctgactttaacatcaacaaaaaaatagaagcaattcattccatgatacgtttgccgtaaacacatccatatgtggacaattctttggtattttattagaaacagatgattgagcgggatagtttcattagtttctgcgtctagggcaacatgacatttatattgttttaaatacttttgtttattactttgaaaaggcattgaatatttttatgtttttaaaatgttaaagttccttgttcatttaatatttggagggaaaatatgaaacaataatataaattaaaatacataactgaaacttttgattttacagttatttaaaatattttttcaacaatattataatatcattcttttgtttatatttatatatcataatttaaatggtttattataaatttaaaatataaattatatatgaattaatatttatatactactataaattttaattatataaaaagtattatctcatgcggtagaataaaatactattaagaaagtatcattaaaaagtatatagcaattgtgagaggataagatggtgtagtatttttgaattgaaattacgtgttttagtagaaaaaggaaacaaaattgtaatgtagtagttcggataaagctgaaagaattgaaggaggcgacgatattcctagtaggaggaatttaatataataagaaagcagatggttgtaagttgtaaccgaaaggaggaaggggcataaccggaaaaggaaataaattagagcggaggcaggcgtcaaaggtcaaattttgaagcttccaaagtgggaatatgtatgttaggtgtttttcgcggatgatatcagatgttatgttccaaatttcactcttaattaaacacgaggaaactgtgatgaattgagagaaacactagtatataaatagagttgaaaatgaaaatgaaaatagaaaataaaatatttgatataactgtataataagaaagaagggtgaagcctaaaatgaaataaaagtttaaattaagttgaagaaagataaaagtgagagagaacaccgacgaggcagaaggagagagagagagtaataaaaaaaaaaaaaagaaacggacgaagaagtccgtgctggcaaaagattccctgattcattcactaactggttgttttatgttggtgcctgcctgcccagtaactctactgtactgccccgcttcatagttgctactgctctctctttctttcttccctgtggctgtggtgttaaatagcaattttggttacaattagaaaccctaaaagggaaagggaaaaggaaaaggaaagagccatggggtgtgccagctccaagctggacgatctcccagcagtggccctttgccgggagcggtgtggtttcctggacgaagcaattcaccagcgctacgcactggccgcagctcacatcgcctacatcaactccctcaaggcaattggtcactccttaaaccttttcattcagcaagacatgctaacaacaaccgatgctcctccctctccctccccttctccccctcacaaaaccaccaaacactcctctccttctcactccgactccgccggctcccacctccacttccactccgactccgacgaccttccctccctccatcattcccctgaaccatcctctcctattcgtttaggtgcttactactcaggaccagatcatccccatccccatcttcatatgaattacatgaagaataaagccgctccttcaattgtctacgagcagcgccctatgagtccccaaaccatgtacgttggagagtcctcctcttcctccttctacccttaccagtatcccccttacccctacacctacgatccctattcggccggactttcttcctcgccgcagcgccaggccgtttccaagccacccccgcctccgccctcccctcctcgctcctccacctgggacttcctcaacttcttcgataacagcgacgacaagtactatccccaaactcattaccctgccacggccacccccagccgcgattccagggaggttcgagaggaggaggggatccccgatttggaagacgaggattaccaccacgaagttgtcaagcaggtccatggggatcagaagctcgtccagcctcctaagcacgaacccccaccctcctcccaccacgacgtatatgatgatcatgatattcatgatgatgatgatgatgatgatgaggacgaagaggaggtagaatatgaggtgcacgtggtggataagaaagtggttggtggagataataatgatgggaacaagaccaaggagcacgccgcattccgtacccggcgacctggttcccggaatccaattgaggttgctaaagagattcagattctatttcagagggcttccgattctggtgcccaaatcgccaagatccttgaggtcggcaagcttccccacaatcgaaagcacgcagcttatcaaggtaacattaacagcatttctctctattcattattcacatttcgctcctcacttacctttacctgatcacgtcctgtctaccagcttcttccaagatgttacatgttgttgctccctctttgtcccttgtctcctcccaaccttctacttccaaagatgctgaatccgcctccgctgctaacatggattttaatgttgatctaacaaccggggcacgcaatctttcctctacgcttcagaagctccttctttgggagaagaaactctttaatgaagttaaggtatggatcttaattcaccaatctcattccattgctttcagtttttccacttttcatctccgtgaggcaatttaatcctgctgctttcgcatcagctcttgtatgttctaatgtaaccaacctgtgctgataatttgagtgatatcaactgctcagaagtcttttatgccataagtgaaacattgttaaccagtgtttacaggtttccaaatagcttttttgttagataaataattaggaagccataaacaataagtatagcagtagaataagttcaaatagaatcataacacatacaaagtttataataatcaattaatacaaagcttaaaatttaatagtagaagagtttaaaagagcctagattgaagtgcactatgcgctatccttatagagaaaaattcccccactacactggtacaataaattaatatgcatgcgctcctctcccaagatacgacaacccattaatccaatcgagtatggcgaaaggatcccgaaccaaagaacaccatgctccaaaacatatagttgtagtaatataatgtaattttataaaaaggagaaataggcaaatggtattttgctgtaggtgtgtgcctatacgttctccttatttttccataagaggaagctatatataaggggggaaaataaccaccaaatgtgcagcccaagtatcacaactaacaaaccagtaacaaacataactacaaatctcaataacgtgcaaaacgcctccaacagataaaaagactaaaaacttagtcaaacacaatttctaaaagataggaataaatagatagggaatagtttttatctttagaaaaaactgattgagaaaaagaaaattatttattttaaattttaaattataggaaaatattttccaacatttttttcgcacgttcatttgtttgcaggcagaggaaaagatgcgggtcatgcatgataggaagtgtcgcaggttgaagcgtttggatgataggggttctgattttcataaagttgattcaactcgaactttgattaggaatctgtccacaaaaattagaatggcaattcaggtggttgataagatttctatgactataaataagataagggatgaagaactgtggccacagctgaaggaattaatccaggggtatgtgatgttaaaaactaaccatttttgttatttgttcaagtcctaaatgtctctctgttcatgatgggcaactctgtatgtagggatggcaagtaatcccatatctatgctccaatccaatccaatccttccattcccccccccccccccccccccccccaaaaaaaaatccatttcttcttcctttccatcaccatgtgatccataaaatataacatacttttaaatgggtgggttggatatacgtccctaattttttttattaattgatgggttggatggttttaattaaatggatcaggaatggattggattttttcattatattcccaatggatcataaatatgtgaaaaaggtttagggtcatgtgttttctacacaaaatttgatttgatgtgcttctattttaggtgcttgtctattatcattgaggtgatatagaatgacctcatgcaaaatgtgtagatcatcttataacgagtcagtcaagcattttctgcctgttcagtggcactttccacttttagctgtttgtattggcttccagtaactgaactaattatgtgctctacaacattagacaaagattgaatggaaggggttattttgttattgagattccattccataggaatcatctcctctatatttcaaccctatgaaatgaactgaaatattgatgcacaatttcccagaattctttgataaccatggtgaaatgtatatatcctgacgaaatccaacaaatccacctgcaatctacacatagtgctgatagaaagaagcaaatacttggccatcttctaagaccatttctgataattttgataaatcctgctatttactctgatgtatgtttataacttccaaccatatgatcaatttggtggtttatctgtccaatttgtggataatgttgtgctcgagttgtcagccagaggaataatcattctttacaggggagatgatgcaaccacgcaagagcttttccaagaaattattactctccaatctacaagaggaactaaaaaccttaaaatatatcctgtttatccttgtgcaagtggattgagcacttgaattcagtattctccatccagttttccgttccagacatgtgtgatgttgtcacccatgcgcttttttattcttcttaagtttgtatggttgaattaatgttctcattttcttttgaagttgctaatttttttctctgtcctttgggataagacatgcatgtgagatatccattcatacatagtattggataaatgttttgccttttctcattgtaatgtaattatcacctgagaattgtttgggtgtctcgatgtatatatggtataatatgagataagcttattttcaggttgaccagaatgtggaaatccatgcttgaatgtcatcatgatcagtgtgaagcaattagagaagccagaatactgggttccattggatccaggaagaagagcggtgatagtcatctccaggcaaccaagcagctcgaacaagagcttatcaattggacattccaattctctggctggataagtgcccaaaaaggttatgttagagcattgaataattggctgctgaaatgtctcctgtatgaacctgaagaaacaccagacggcatagtcccattttcccctggtaggattggggctccgcaaatatttgtaatatgtaatcagtggtcccaagctttggatagaatatctgaaaaggaagttgttgattccatgcatgtatttaccatgagtgtgcttcagatatgggaacaagataagctagaaatgcataggcaggtgatgaagaacaaggatcttgagagaaaagtgagaaatatggatagagatgaccagaagctgcagaagcaaattcaagcattagagcgaaaggtggttctggtatctggagaaggtaaaggtctttcagtttctgagaatatcatatatcagagtgacaaaagcagtagtctacaggctagcttgcagtgcatttttgaggccatggagagatttactgacgaatctgtgagagcttatgaggagttgctacaacggagcgaagaagaaagtgctgcccaaaatcatgagagagtttcatagggtggtgtagctgatggaagttggaatcatattatctttgccatttaccgagaatagaaactagctgatctccctctactaactattctttacaacagagtcttgggaggaggggttgggtttgatttctcactacgctaagctaactgcattggagctgaagatactgctgggatgggacagtggaatttattgtcaaacgaaaagataagtgtgaggtatgaggcgcacggttgctttttgggtattcagtgctataaggctacaagtggagttgtgctgctaaaagacaggggagcccacaaattataacatctaaatggttcttctttctgcattagaaaatagaaatgaaggagaaggacggactttcaggtatagaacccctgcaactggcaagtcgtgtgctagaaggtgttcattgctcaaattgaagcagtaaaattggaacaagtctcgttcgcaacggagtggagtaacgcacgtcactgaatgcatgggtgttattggttcctgtataaaaacattcgtttttaagttaaattattgtacagattacctattaacactgagcaggcttgatgaaaaagcatttagaataaaatatttcttatagccatttgttcctcaactggaataaattgctgagaactgttcaaagaatgaaaacagaactccgttattaaatgcaaagcaacttaaatctgacataagtggtggtgggctcttccgtgaccaactattgttcatgataagatagacaacggagattggaacgggctggccaaaccagactccaagagctctcaaagtgaaccaacctcttcaccaaggctgctcaaaataaccagttttaaaaaaataatcatacaagtagttataactaattttatagttacggttatttttattgaaaaaatagttataattataaatctataaaactataactagttttatagaaatgattattttaaataacttatttttattcattcaaccggttatgtaattgattttaaatataacttgttaaatagttgattatgcaattagtttattcataatctgttatatatctatattttaaaaacaataacaagttatatcaaattataactaattgtggtcataattataatattcacttataatctagttatttattagagcatggttgaaaatcagctaaaaaaataagtcatgttgaagtaatttatttagagcatgttgaaaatcagctaaaaaattatttttgagggaaaaatacttttacaaaaggatcaagatctttacgttttctttcattttatttttatcctttggacctacattgaaatgtataacacaacaatttcaactacaaaccaaacatgcatttagggtatattagaatttttggtgggagggtccaaaaatatgtttaaaagtaagctaaaatatatttgtgatctataataaatatctaaattttttgtttactccttaataaattttttcttcatttttactttcagataaaacaataattttatttttatccttgacactttttttagtttatgataaattagcaaatgaacaaatacaaaatttactaatttatcatgactaaaaaaagtgttaagaaccaaaaataaaatggttatcttattagagatttaatgaagaaaaaaagttatcaaaaaaaaatacaaaattcaggtatttattaggtttacaaatatattttaaccttaaaagtaaaatgattttgaaattatgtttaattaatatctccaaaatcaatttagaaacttaagtttgacctataagattaatgtgcaaatgaaaagagaaaagtttattagacaacatggaatcctttgcaaatcactccaccttgcacattaactctattaacatttatatatttttttcttctatttttcattctattatattatatcatctatagtacttataatgtttttgatccttttttgtctctctgtcaaatatcatatggtgtactctcatctctcatcattttccatttataatccaactttttggcgcttgctattgtgaggtgttaatgaactttgcattttgttcgcctataataagtaggtgcagaggtgttttcgagggattggattgtcagtgctgctaatctttgtgccaccctacggaactgaattattcccatatgatgttttttacttcaattattgacatacggtaataatattttgtctgtaaaattgtattacttaattgcattattttttttcatatatccgtacaaggaggggggcttactgcttacgcgcaagatttttattttattgttgtccttttcagcccttgttacgaaattgaaatgtgattcttgcgttgcgtggtacattgtcatttaacaaaagctgcacaaagatgttattggttattattgaatttgaatagggaaattttggctagcagacattgttaactgcttatcatatgtaataattgattataacatgcatacgttacattatttatgaaatatattttataattttatttttcttttttaattatatgatataaatgtattgtataaatataattttgactaatgtttaatggaaattgttgtattaacaacactccaagtaaacgtacgaaagttggtgtaaaatgtaagaaaatgtgtcatccattgtaggcttttttcctaaaagggaacattttttttttctttattaccatttagagggtcaattttaaataattatctaaaaggggataaatcgtaatagatgttacaaattttaattttttagtagaagtcgtaaatgagtttacactttagtttaattattttttaaaatttacgattttaaagtcgtattaatatttaaaaaattgaagttgtaatattatttactactttaattttttttaagaactatgacttgaaagtgataatgttttttacaactttcaagttgtaattttttttcaaatattaccattttaaaaaaattatgaattgaaaataataaataatattacgacttcaattcaaaaaagtaaaaaaaaaattgatacgattttaaagtcataaattttaaaaaataattaaactgaagtagtaaattctttaatgactttagttaaaaaaaaaatatgttacgggttttaactcaaaagttgtaatcgtattacaacttatacttttttggataattattgaaaatcgacccccaaatggtaataaagaaaaaaaatgttctcttttgggaaaaaaaaagctcgatttgtaggattccatgttgtatgataaacattagaaatgagtagggcaaataaaatcataggttaaattagtttgttggttttctaattgattttttaagtttgatttgattttttaattttttgagatttaatttgttctttttaaaattgatttattttgattctactatgtctaaattgagtcaacggtattaagaaattatattgtgactgctgaaaatcatttaatgataattttaaaccgtcgtaaaatacatatttagacactaagatcaaatttaaatgaaagaatcactcaagttaatgtaaacaacatgatcaaattaaactaattttacgaattagaaaattaaactgaacaaaaacaaaatcagattactaaatcaaatcaattttaaaaattagatgactaaattgaatatgaaaaaaaaagcaacatatccagggggggggaattaaccaaaattatataaataattataattataattatgtttggcggtcacttcttagttcatacctatgttatgcagcacgaactctcaccttaaaaaggaaaaggaaaaactttgacttgattagaatatgcatcccggcacgtgatcaatggtaatggagaaaacatttcacgaaagggagagacaagtcttaaaatgcagcattgagcaacttaattaaacggatctgcgcagaagcttccctccaatcagattattcttttttggtttcagattctcaactttaggcaagtgaaaaggtaaggaatcagatttatactagaaagaacaactttcagccataacaaaccaagccttttaatatttcaacacatatgatttattagataaaaatgtaccaaaacaacaataagttattttaatatataaaatttattagataaaaattagatttaaatgtaattttgatttttctattttattcaattcacaattttgattatttattttaaaataaaaatatttgatcattttattttaaaaatttataattttatcctcatattttttagaaatatgcaattttaatctcatctttaattttatttgtattttatttcttacattataattaattaaattatttttaatgatattttaaacaaatatgttaaatttaagatttaattaaatcaaaataaaataaataaaagatagataaaattaagaatttaattaaaattaatttttaaaatcatacaatttttaaaacagaaaagccaaattaaaatgaaaagattaagcaaaacaaagaaaacaaaaataactttgtgtgatataaattgaacccatatgatgtttatcttgacttgacgtgtctaggttgagatatattagtcggcaaggtatcattggtggagctagctagatttggaagatatttgtaatgtgtcggaaaaaccaggtaggaagtcagggaagattttacttttccgtaacaaaaaaagtggtggtgtcgtggtgaatatatataaataaaaaagaaggtaaaatagtaacaagaatgggaagcattgatttgggtaggtgaagactgaagagaagcagaataagtaagatagggttgtagttaaagaaagtatggataaaaaggtaatattgaggaagagcatatgatgaagttggaaatagatttaatagaatattaatgagtgctggattgtaataagtaaacagtgattagtaattagcaacagtgagggtgaaggaagggaagggaagtgaagcatagcatagaaacaaggaaactaaaaaaattgccaaaaaggcaaatcacgcgaacacaagagtagaagagtatagagtctgtggagatctcattcatgatcggtgataattgttgaagagagagagagagaggatgggttgttgccaatcatcgatgttgctgagagtgggagagagggagactcaccctgatcaggagaaggagaaggagaaggagagggaaaaggaaaaagagcaagcgtacggaagccaccagaggcagtctgagggcgagaaagagggggtggatttctcgttctcggagttctcgctggcggagctgaaggcggccaccaacaatttcagctccgagtatatcgtgtcagagagtggggagaaggcacccaacctggtgtacaagggtcgcctccagaaccagagccgttggattgctgtgaagaagttcagcaaggctgcttggccggatcccaagcaattcgtcgaagaggcttccggcgtcggcaacttgcgccatccacggctcgctaatttgatcggttactgctgcgacggcgatgagaggcttctcgttgccgagtacatgcctaatgatactcttgccaagcatctcttccactgtatgtgtaacttatctgtttgttatctgtactagtgtttatctcatctgttcattcattcattggttcattgattcaggggaaactcagactattgagtgggccatgcgtttgcgagtggctctgtacatcgcacaggctttgcattattgcagttctgaggggcggcccttgtaccatgacttgaatgcttaccgtgttctcttcgaccagcaaggtgatccccgtctctcttgctttggttttatgaagaacagcagggatggcaagagttatagcaccaatcttgcttacacacctcctgaatatttaagaaacggtaactaactcccttcttcacattttcttttttacttttttatgtataacaatacttctctcaatcatatttcttttgttacaggaagggtcacgcctgaaagtgtcatttacagctttggaaccgttcttctagacctcctcagtggcaagcacatccctcccagtcatgtaactgccttctatccttaacctgcccctctcttctgattccacatatcactaaaagctgtaaatacctctatgtttttaatcaagccattttaatcttaacatgcaattctcactttcagtgtttttccatcttgactattattgtgttaataagtgcttgttatgacactatttattttgtcgcattgaagttgtgactgtacctcaaatgatattacgttattgttcaataaatgaaacatgatcttatacgaatgacaacttaaggtatggaaacctttctctttgattaaatacttaaatacttaataatggaagttgatgatgctatgatagttatttatttaaatttaacgtcaattcattttccatatgctcacgtgttcaattagttttcttcttggttggtgccatatggagttatctgattgtgtttgcaggcacttgatatgatacaggggaaaaacaatatgctcttaatggattcacatttagaggggaagttttcaacagaagaggcaacggtagttgttaatcttgcctctaaatgtttgcaatatgaaccaagggagcggcctgatacaaaggatttggtcacaacacttgccccgttgcatacaaaacccgaagtacagaccccttctctaacttaataatggaacatatgatttactggaactttgttgtttcaacagccctatcaaatattccattatcacctacacaaaaatttatgttggatgttaatgtctaatattaaaattctatgactttttatatttcatatttgtttctttggtcactcatttcaaaattgaatctacatggttggggtcgcttagctcaccatcctcaacttacataaaacatggtaattcaaatattaggctggaacattttaaattgtctttggagaaaatttagttgaacctgggttatttgcaaaagttcattttgactctagggtttctttagtccgtaaacttttccacttgcttgagatgatataatattataagggttttctgtataagtaaggttaaaagatgtttgatatgtcaagttctcaaacagccaaagtaattggtttatggttctagctgacttgtgaattctagttagcaaagaattagtcatctttgctggtttggtccttgtttcagagttacattaataaacttcattcaccccaaaataaatcttgtgtgtactactgttagtttattacttgtaaaggatagaagaaattttagtaattttcatgatgtgatattgtctagaaatataggcatatgaccttcaaggaatctgttctttgtgtacatctatctcaaagagcttagtcaagacttattttattttatttttaaaatctatagccagttcttagaatttgagcttagggcataattcagcccccacaaaattggtattaaagtggcttctaagttgaggattgccaaagccttcgaaagactacattggtcatatatttagttgatgtgagatcttaacacaccttcatgcctaggaatagacatctagagcatagacaaatactggtgacccaataacggatgtaggattgaccttgataccatattagaatttagatttatggtctaactcaaccccataaaatcagcttgtaaagtgaggactgccttttgaagttctagttaagtcgcatctctaaggcaggtcaaaaaggccacattaataggagtgacagcaattaaggtgactttccagcacaccctctcacacctaaggttatgggcctagatgttgcaattgggtggcccaacaatgaattttggataggctttgctaccatcttggaatttgggcttagagcccgactctaccctataaaattagcttgaaaaaaccaaattgatgttagattttaacaccttttgcctcacaacccaataacaataccctctcatgcctaggaataaccatctagagcatagacaaatacgggtggctcaataaaggatctaggataagctttgatatcacattaaaatttgggttaggcttagagtgtaactcaatcccacaaattgacttataaggtgcggattgctcaagctttatatgctctatttaagtcgtatctctaggtgatgttgggctaaacacactccattgaggctgtagtttagccaactccccaggaggttgcaattaagaaggctttcttaacccccaccccccccccccccccttcttctctctcaaggctatataggctcggaacatggtaatgtgggaggcccaaccacgaatctaggatagatttttgggatcattgaatttgggcttagggtctatctcaattccacaaagctgactttaaaaattcaatttgtaaggtgacgattgtccatgccttataagaactacattggttatatctcaagtcaatgtgggatcttaatgcgcccatgacccagtaacagcccttcatgcctaggaataggcatctagaatgtagacaaatacgaatgacccaataatggatttaggtttagctctaataccatcttaaaatttaggcttagggcctaactcaaccccacaaaaatggcctgtaaagtgagattgctcaagctttataagctttatttaagcttataaagagcatagtcaagactttttatctatagctagttcttaggatttagggtctaacttaaccccacaaaaccggcttttaaaaaaccagcttctaagttgaggattgtccaagccttataaggataacattggccgtatttctagttgatgtgagatcttagaatttaagcttaggaactaactcaacctacaaaattgactttaaaaaaccatcttgtaagttgacgactgttcaggccttgtaaggactacattaaccttatctccagtcaatgtgaaatcttaacacactccttgcgcccatgatccaatgacaacaccgcctcacccctgggaatagaaatctagaacatagacaaacaaaaatggcctaataaatgatctaggacatgttttaagatcatcttaaaatttaggattagggtctaactcaaccccacaaaaccaacttgtaaggtgaggattgttgatgccatataagctctattaatccatatctctaggtaatgttggaccaaacacaccccttgagactgcaattaaccaaaaatgaatttaagataagctttgacaccatcttagaatttgggcttaaggtttaactcaattctacaaaattgacttttaaaaaccagcttgtaagattttcaaaaaaagaagaaaacatcttgtaaggtgaggactgcccaagcttaagagtactacattggctattctctagttgatgtaggatcttaactctcccctcacacgcatgtcccaataacaacatctcttcatgcctaagaacatacatctagaccatagagaaacatgggtggcctaataacgaatctttgatggactttaatgtcattttagaatttaggctcaaggcctaactcaactccacaaaactggtgtgaattgcttaagctttataagtcacttctctaggtgatgtgaaactaaacacacctcctccaggttgctattaaggcaacccccaaatcctcatgctcatggtggcctaaagcatgacaaggcaggtggctcaacaatgaatcaaggataaattattaacatcttagaataagaacactccctcacgaccagggataacatctagagcatagagaaatatgggtggcccaataacaaatctaggttagactttgatacttgattagaatttgggtctaggtcaaccccacaaaatcgccttgtaaggtgagtattgctcaaactttataactctatttagaagctatatttctaggtgatgtgggactaaacacaccctttcacatctacaattaaggagactctgaagaggctgcaattaaggcaagctaagggtaattgcaattaaggcggttttccaacaataaacaaattttaattcatatttttcaagcattttaaatgtaggacaatctagtacacaaggctccaacctaatggagtttagggagggtagatgtatcaggctgccttacccctgtgagtggagagaggttatttcttggatttgaatgtgacttcaaagtaagacaacaatgttatagttgttcaaggctcgccctctatgtaagcattttaatttgtgaatataaaactatttatgtagactcttaattgtattgcatttatgcattatataaagacattcagttggataaggataacccaattgttagactcgcatgatttcaaattttgagcttttggtcatacacctggttgaatgactttagggctgagcccggtgttacttttaagtttgcatttacttgcagtttgaaaaatcttaaactatatgatatgattttcatgcatgtacattgaaggttttgaactttatatagccatcggataaaatttagttatctatctataaattttaactttgcattcatgcatatcttacaagaatcttttaagcagtatgataaaaatagggcacaagccaaactagttctatctttgcaaggctgaacgtgactaaagaaagttcttccatgctttttgtatacttttttcaatttgtcatgcatgcaagtatttttattgtcttccttgtcttatcatgtatttctcagtgtagaaaactagagaagggattaaagatatatattgagctatagcaattccaacatcttctgtcacttgatatggaaattatccttgttaaatggcaatttagacatataaatgggattaaagcagaaacaattctagttgactattattatgtgcttcaggttcgttctcatatcatgcttggaattccaaagcatgaggaagctccatcaaccccacaacgtcctctttcagcaatgggtgaggcttgttcaagaatggacctaactgcaatacatcagatcttggttgcgacacactacagggacgatgaaggaactaatgaggtaactgatgggtgcattggttttaaattttctatttttaattggatgatgtgccataaggtttgaatttggattggttcagttgtcgtttcaagagtggactcaacagatgagagatatgctggaagcaaggaagcgtggagactatgcattccgtgacaaggactttaggacagccattgataactattcccaggtgcaattctgcacttgtttgacattgtaaattattgtagctgtgctatgtgcacgctaattattttgagatgcttctgcattgttattcatgcagtttattgatgttggaacgatggtctccccaactgtgtttgcaaggcgcagtctatgctatctgttatgtgatcaaccagatcctgcactacgagatgcaatgcaagcacagtgcgtttatcctgactggcccacggctttctacatgcaatcagttgctcttgcaaaactggacatgcacaaggatgcggctgatatgttaaatgaggcagctgcattggaagagaagaggcaaagaggagcaagaggatcatagttttatgcagtgggctaatttgagggtgtcaagttctgtataaaggttgagctgggaagcaaaactaacgtttgaatgagtttaaaatgtgtcagagaaatacaaaaagtggtggagtagatggcacatgcatttttatttcaccatcttataggaatcggttacaacttgaaaactgtgcttgtgcactctaaattgggaaggaataccggtaatttttccattgttaatgaaattgattggttgatgcctactgggttacttactgtcaaacaggtgtttattgaggttattctaactcttcactggtcaaggccatggtgttcatgacattatgtgatgcctgcataattcggtttatttttcaatgattggtaaaatcctgaatacaaagtaccggcccatgcccatcggccatagcagtaggcagcatgcacgatttttaatccagcgctctattttgatctttagagatatttaaaatacttttgtccagtttatagaaatgtaaattataaatttttgtttctctcattacctttggggtttggtttgatattcccttggatccttttagtttaggacagcttccgttactttagcctatatcataccaaaagctactcctactttcaaagttactcgtgcttcgtctagcgtctattgtacaaagataacataaacgttagaaaattttatgggtttgaaatagtagtataagttgagaattttagatgctgtcttaattaacttagtatatcctttatcataaacacttagaccccattttctaatattccataaaggtaaaccagttcaaagggaaaatgttttaccattaactaacatagaattgttctagattaatcaatggtattaaattcacattttgaatatttaattgtgttaaatatttagagttagaagtgaaattttgttgttcataattctatttaggtcgagtaagattatctttcatattaaataacttatctatacaggaaaaaaactgttttaatggtttcagattatatcgattgattttgccatgtaggtttttaaacaaatgtcaattctcattacttttcctaaagtgggtacatgccaacaaggatataacctcatctaagttccgagtgtttacagattggttgattcagttttaaggaagagaaaaatgaactaatcaaaataaattagattaggcggagagagggaaaccaagttcatcaagaaggaattggtttgttttttggttgatgaatttggtttccattctttttttttggttgatgaagttgctccaaaccaatagactcaacgtaaatattaatgttttttattagaattttttggtacattgatttttgggtacattatttacttttgatttaatgcgacgtcattgtagtatcatcaaataatgtatcttaaattttatatctatattgttcaaaaaaaattactttcttatttctaaaataagtgtcattttaggtttttttttttttgtaaatcaagaaaaattaataaataaatgaaagataatagtaattttacaaaattaaccttaatgttaatattgcattgcaaaactaaagtgatatttattaggattatcaataaaaaaataattaatatcatattgaaaagataaatgcaacacttattttgatttttttcttttcaaatacgatatttattttggaacggaagacttatatgcacattacttgaggattttaaacttaaaacaattaaacaaaacacttacattctagatcaacaattggtaaaattaattgttcaaataatttataaatataaaatgataataacaaacatgtttatatgatatttttatacaaagtttaattttaatttattgatcaaatatattttaggataattataattttattttttaattgattttaaagttttgcaatttttatttatagattaattattctaattatatttttttagttttaattattatacataatttcattatgcattttattattaatcttagattttatcttaaaatgttccaaaccaagtataaaataaaataaaataacatactcttaagtagatgtcatattttcattatgttaattagtggactagttaaaatatttcgaaatatagtgttaaaatcatacaataaatcatgtaattagtttaatggttttttttagtaatggtttaaataaatagtataagagaaaccaaaaactaataaaattatgtcttacctaaaaaaagataataaagaaatttaataaatattttatggataaaaatataaataaaatataaaaattagaagttagtattttaaaaaacgttatttgaagtaaagtataaaaaatgttataaactattaaaataagtttgtttataaaacattgttaataaatttagacaaaattttcaaataattaaaaaaaaaggttaaaaatttactaaaagtatttggcaaaacatacacaaagttaacaactatttactcgattacttctccttctatgatgaccaaaataccaaattaatcaatttatattcactctccactttatcattaacattgttatacaaagtaaaccattcttaagaaagggatgatagaccaaatagagacatttttaaaaacttttttactatatattaaaaaaggctcttccaaaacatattataaaataatttggggtttttttaaggcatgttagaacaaaattaccaagttaattagcaatttttgagccacgtattattattttgtatatataaaaaaaaaaaaaagacttgcacttaacatgcatgctaaatattgttgaaccaaaagggcgtaaagtgagagagtatgccaaagtgctctattagggttggggtggagacttcaaaagaggaggcggagagcagggatgtgacgtggcaggagccatagaaggagtgcctccgcagtccgcagccacagtctaattaaggaggacccacgcaattaagtgtgtgttagcctctgttaggggtgttcgtggtctggattggatcggttttgaagcaaaaaatcatccgatccaatcccttcggtttggtcatttaatcatccattcggtttaaattttttttcaaatccgatccaatccacaccatttctaattttcattggacaaacatgttcattggacaaaataaggagcaatatattgaatttttgatttttgggctatgatgaggaataggcccaagtaggtaaagggtaaggtatagtttataattggatcggtttggattggatcggtttccactagtcaatccgaaaaccgatccaatccggtgaaaattttcggttttttttggttttcggtttttcggttttcggttatttcggttatcggtttttcggttcggtcatcgcggtttgcatcggtttggatcggttgatgaacacccttagcctctgttaagcgcacacagagtcatctcattttagaatatttcaccctaaaattttagatgcatgtgtttacgataaattcgtaaataaatagattacacttcaatataaagaaaagttatttcaagatagagagtcttacctttaagaggctttgaatttctaatccgatagagaatccaacccaacttaacttctataaatactagcaattaatgttaatgtatcaggaaaagtggtaattgaatacatttaatatatatcattaccttggtaaaattcatactaactcgagtatcattgtgtcaaagtgttctttgtacaagtatatattcacccatttttaatggtttagtctcatcagagcatcaggcaaactaaacagattttggatattaattgatcagcggaggagtgactagtccataatcaacagtccaccttggacatattagcatgtcagacacaaaaaatgttgacatcagatgaatcagatctatgaaaagtaggggaagatgaagtagtaaaaggaatatgtgcacaatttaatttccctcaccaatgtcaagacttgaatgcaactagggtttgaccacaaaatttcttcatgatacaatgaaaacacttgagttttttttgccttttcaaaactcaaggcagataataatgatgtttacaaaatgataattttgttttcatttttttttttgaattataatttttttattggatatatatatataaaaggttaacttagtgataaaagatgtagagaggaacaaatagattgtggattcgattcctctcgataataaaaactaacaattaaaaattaatattttactgataatatatatatatatatatatataatacaaaaatatgataaaaaagaaaattctaattaaaaacaaaataatttgattttattaaagaacaaaatatttgttatgctgattattttttaagtattttttttttttttgacaaaattgcctgaaactcatgttttcttaaattcaattgtgaatattattatgctagtaatacctatactatttttggtgtaagttttctatgagattaaccaaaggtaagacaaatgaattttagtacaattggaacatgaaagaatcatacaattgctatatatattttgggattaaaagttgaattgaaccttttatgaaaattatatatttttcaagtggcgtctttttgaaagaaaagtgacacctctcaaatgaaatgatgtatattttaaaaaaattataatttttgaagtaattttcatttaatgaaaaatcacatcttttttacttgatatcgtatatgaaaactcacttttatttttaaattattctttacgaatagatttgtattttcaatgaaacaatacaatcttcaatatgaaataattcagttttcatgaagaaacacaacacttcatattttgaaaatttatgacaactcataaatttgacactcataaaaaggttgagtttaattaataggtatttttttaatgttaaaattttctttttattgttaatcaatcaaaaataattattagtatataatatatatgatgattcatgattagatgatagtattaaatccctttacatacatatccatcaaatatgaagattaaaaaggtgcatgtactttagaaaatgagatatttttttagaagaaaatgaaatgttaattatttataataattaattataattaaacagttgagattataataaaaatatttaaaaaattcttctttctttatttctttttttttcttattacattatttatcatttgtttatctccttttttttttttaccaatatctctcctttctattactcaaattttcacaataaaatgggatagacgaagagattcatacatttttttgaacttgaactgtgaagtaaaataaattaatgagtagcgttatatctttttactgattttcctacaatttctcctattatttaataaagaaaccactaaataaaaagtaaagtattttatatctaataaaataaaataaacttaatacttatcataaataaaacagtaaaataatgctatgatatagtataaaattattcgaaattaaaataaagctcgttgcaaaaggactaagaaagagctgttctagcaagaaaaggacatgcaccttcaaattcatcgcgtcaactccgtaactccatatactgacggaggaaacatgtctaattaactttaatcatacaattattaatttatatttaatcatttagtttagttatacgattataaataatttagtgatgagaatgagatgataaacagggtggctctgctccagcacctggctgcagagggaggtgacgtggcctgcttggtggtttgacttattggcacattcatgtcatataacaaatacatatattataaccgcttcattaaagtcttcagcatttgcaaatccatattatgcatgttataccaaaactacaaatatactcattcgtgtattgggctggagtttaatgaattagaaatacataataaccaacaattaacaaagctgtcttcacagatcagcccttcttcattcaagaaatgcaccataccacctgcagacagtattctatataagatttttgataaatttctttaaaaatacttctaaaaaaaaaattagatgaatttttcataaataaaaataagttttccattagctaacttttagaaactcatcaatatagtttctctaaaagatgagatgacatatacaaattaattaatggaaaactcattttaccttatggaaaagttcattttattttttttcttcttattttctttttctagaaatacttctagataagtttacacccaaacaggtccatactcgagcagatctagacgaatgaggatttaattaattcatatttttgtcattttgagttacaagggagatgtggctttgagaccttttcttccttctcccctggaggaaattttgaattgatttctttatggaaaggcctggcgagacatgtatcaatagtgcttcagaatgcaagccggtagtgctttcctccatttcttgacttgctaaccatattatcattcttgcctgcatatatatatttttatagtattaaatcatgagtttaatggtgatgtaagaccatctaatcacaaaaaattaccatcgttgatataatcttttagataattttataaaattcaacaaacttatcatatatgattaattataattagatgattgtattttacactatcaatgcataatctgttttctattagttatttagttttataagcgttaatttaatttgacacatctaattatttccttccatcaaaattgtgtaattattttatcttattaatttcttttaaattcacaagcttgcttctcccattttgtgagctaaatgctgatttccagttttggagaaaaagataaggcataatcccttcttttatttcatctatttaatgtttcaagaaattctttcataccttcaaaattgacgtattattttctctctctaaatttaccggtatcaataaggggaaataaagtatttcaagaaaggacaactcagttaaataaacttattttttaattaggacaatttaataaaaaataaaaaataattttaaattcttaactaatgttcaagggatacaagattacaattaaaaacagttatatttttttaccaagaaaaaggcattatatctattaatccttatttcagttttatgaattgcttaattaaaaaatttacattcattaactaattcatccgttacttttttagtaataaattatagaagatatattattttaattatttcaataaaaacaatatagtggaataaacatttttttatacttataatcgaatttatataatttgattagatcttataaaataaccttttaaaagataaataaaattgcatgaagagaataatgatgcaaaattttattatgctatcaagtacagtcttgtttggtaacgcttaaaattgaataaataattacttagtttttaataagaataataagaataagcaattattcatttaaaataagttaaaggaaacattcaccgagtctgcagttcttggaatgcaataaaaaaaaaaatggtttaaaaaggagttaaaatggaaagatagaagattggaagatactataacgtatacctgaagttctgctgtgtcaaaaatgcattggcgtcgtccattatgaagaatagctacaagtttattgtggatgttcaacgtcccattcctgcaaaaatcttgcagaaaaggagggagaattagcaaataacgtaagaagaattccacttgcttaattcctgagatatacaaatgaagggagtcataacgtaaatattgaaaagaaagagtccagattgcttgcattgaacgatgggaaggtgatgaagacggaagacgaagatccaaatagcagtttctcttcatgtattaatttgaaaaatgaaaaatggaactattttgtaatgggtaacaaaagatatggcaattaatttgaaaatattggagaactcaattaaaaaacacagggagttgattacgggaagggtgttatatacaaacatagatgaaaaaatatgtttggggatgtgggaaatgagttacacatgcccaaaactattcattatggttatagcaagctatagctcttatcagttgcgtacccgcggcattcaatgcaattactaactcaatctgtatttcatgtgccttcttaagttgacagctatcattgtttgctcttctaaagtacaaaattacccaaattggatatttggtcacttggtcgactttagttggttttactttctctgtgtaaccactcttattgcattatgcatctcttatactacgtgctctctctaatttctttcacgtgatagaattcatttcaaaaagacatgaatttatatatatataacaccctttcattcagctgcctatctatctctctgttggtcattttccactagtaacttctatgtactatttcatatcagcacggattattataagctattcgatgaggaccttaattaaatatgttaaatattatttcaattatttcgggcatatatttaataattccatcaacactaatagggtccttaattagtttttccgcacaaaacttccaattatttgttgaaaaattgactattgcatcagcaagatgaaaattgaccagcaaattgactgtgatcgtctttcaactaacttctgaactgattttttcaaaattagccttcaacataaaattaaaaaaaaaaaaaaaaaaaaaaaaaaaggcaatctgagagttataatatttatatttcttttttctacaatatcttttacaactcttttcctccaaattctttttatcacattatctatctcacgtttctcgtataataagaaaagttgtataaatttgaactagaaacctaatttcttaaaatctaaccggatcaaagagtactacacacttagattgttctcatgtgtcacatgccacgtgtgagatgtttttatttttaattttttaattttaagaagacgtgtgtggttgttctacccagaaagagcaagatatatctaagaaatcatgcgcttcagttcataggcctaatatgccaagattgttttgagccaatgggacataagaatatgtagcaaaatgaattttaaccaattgacgactgtaaagtgatttattttgaaaagaatgttgacattttcatgtaattatgtaaaaaaacaagtagaaaagggtaaatagtaataaaaaaatgaatggtaaaaaataaaatgaaaaaatgaagaaggaagagtaaagagtaaaagatgaggaccaaacacccaatccctctgagatggacgcggatactacattatccagtgcaaatttttttttcgcaagttccataagtgattaaaaagagcatcaatcacatacaactgtgcaaaggcacaggcacaggcacatccgtacatgcagaatgcattcaccccaagtgtaatcctttatcgatgataaattcctaactaacactcactggtggaaatggtgttcacaccttttcatacttacctccaattccaaacctggttggcctacttcataatcttcaaagcaagcacatggtttaagcattttgtcttttcagttaaagccacttcctagaggccgacccctgattctgaactaatctttttttgacagagattctgaactaatcttaagaggccaacatcacaacttattgatcaaaagaggcaacatatgtttatacctctgatgagctcaccctgctatgctgaactgttttccctccctcttgcttaataagaggaccagtacattcaaaaacgggatttttttctttctaatgtcatcaagcattagatcatagtctgtgctttaatttggacttcactcgtgttttcttgcattgcaatttaaaagagcattatcctacttctataaaataaatttaaatcttcacatatgttccaaaaaaacaatttaattctacacaaaataacttttataccattattctttttcagttaatcatgtgtttccttcaattaatgacacgtcttttaagttttttcataatatatgttaaattattattgttcttaaagtaattatgtaattaaaacgtttttttttttattttctttaataatactcactctccataccaacttctcacttacagaatatttttggcccataaatgagtttgatcgaagctggctaggtcggttttatactagtgtttaaagttggctatgttctttgagtataggttttgattatcatttcctgtttgtttgatgtctgcagctgtcttctttttgtatgatccgtcacctatcacttccacaatcaaagaagagcaaggcacttttcttcatttcattactcgactttgtgcagttctaggtgaaacctttgccctaacaagattttgtcttcaccaattatccaccattttgccatatcaaaagtgaattgtcctctgaaaggttgagatgtggttattttctttgtaagaaatggttaagttggaactgcaacatattttttgtgcttgtaattagataattcaactgcagtttggcactttgaataagaattaaagatattgcgactaaatttccctaaattggtttttccattgtccttattctaaaagtgaactacggtatatatatttccggcaactcccctgcatctgtaagatttagaagctaagaaggactccctccattaaaaggatggtggcatagatgaaaattattcttttcatctcttccacagatttgtgtttgtataattccatgtattgcgggacattaatggctagcagttcataatctcctttgcttttggaaagggtatttaggggctctccttcgcattacattgcatggttttgtcatagctacgtgcatgtggaatcaatttctcatagttttgcccttccatttcccaattttataaatttaaaccgcaactggctaactgaaattcatgcactctatctaggacaccttaaactgtaacaacttttcctttttattcatgcactctaacaaatcgccggtagtaacttgagggtgttttcattaatggggttgaattagtcgatgggattgcttgtcagtgaaaggaaagagcataacatacaaaagtaacgtttaactatgttaacaaatatcatgattcacaccttcaagtggaaatcctcatgtttttagtgtaaaaagttagtaaaaaaagaaagaaaaggaacaagtcttcataaccgaggaagactgccctgaatcagtcgcatcaactgttgccatgctgcggcagatgattctcttgttgtctttgtcgctgatgatgtcctccatcttcctgtacctgttcttgtacatgctcacgatgctgctgctctgtccagttaacattttcaaaggaggattgaacctgcctgctagttctccatccgatgaattccataacgagagaattcatactgatggcaatcccaaatccagtgaacgaggaaaggagaatggagagaattgcattaaaattgagctacaaaattgaaaaaaaggtaaatgtcaaaatatatatttttgctctcaccgagtgccaagtatcttcatgaagtcaggataggaactatatcatcttacaatagtataaaatacatgagctaacaggataagagttgcaaactggaagcaagcataagcccatacgaaactcctgctcactgccaccacaacaacatcactcatgttaatcagaaactaataatccagtatcatgtagtctacagcataggattatagcaactccagaggatctaatgaacaggtaaattacagagtatgggccttgttctaatcaattctcgtgtcagaatcattaggataatgtcaacttcttttaccatttatttgttttaaatcagacattacacaccaaatcagatgttgcggctgatagaaattgtttctttgaactcactaaacttaaaatgaacaggaaaattacagagtatgggtcttgttctcatgaattctcatgtcagaaacaataggacaatgtcaacttgtttcaccactttattcgttttaaatcagatattacacaccaaatcagatgttgcagctgatagaaattgttcctttgaactcagcagacttaaccgtatactccatttgccaaaacccaaacaaactttgtttcttttaactcacctgacttaactgtatcccccaatttgccaaaacccacacataatctggttcgaaatcaaagtccaagatttacatttaattacacatatcaagatccagtacaggggtaacaaccatgcattaactaaagagaactttgaactgtagccatccacccacagtaggacaacaacatcaatgcttttttccacaggactttacagaagaaaactcagggaggagggaggaggaagaggaggatatggatcagcaccatttagagctagaacctttataaagttttcttaggtctccatccactccttttaattggactaccttccatttgatatttttgtcactaaggctcctactgctctttaaattaaaattatttaacaatgttggcttctcccttagcttaaaaactattattatagaaccctggcccgttataaaagcaaatggaagtcaaaacgtcagatgttaaagggaaagcttctgtgttctggatcctcccagtttgttaaagcttacaaaaatgattctgcagtataagtttttgggggggcatttttcataagctgctattttcaacctatgaaaaaagcagtaaaacagttttttaaaaacaaaacatacatataaaaatcttttacttaaaatatagtttatattcaaaaaaagaaaatgaaaaactcatataaacaagcaagaaatacttgaaaaatgcttattctcccatttttttgggggtacaggaatgcttattcttccttgataaactagagttagacgcttagtaattacagtcgtaatgagggtaattctaaatagagaaatgaggtgtacagaccttgtaacttatctcaattcttttggtggtaggaaaagcgcacataaggaatgacatttgcaggtctagtgaggagagacattaaaaaataattccaggccaatggaggccaaaacatttgatttagattttataagaacttacttattagtccaatatttgtcaattacaatgcattgttacttgttagtccaatatttgtcaatttccattgcatgtattccattttaatacttcatgattatttttaccgttatccttatctgtaaccatagcttgcaagtgcataataacctacttgatgaattccagcaacacactttccaatacactttgtaccacgtattaaaattcacgcgagtcttagtaaataaaaaatgggactcattaaataggagatgaagcctacatgaatatcatccaatagaaggaagtgtcttcaaaagagtataaagagcatattgctaacatctctctaacttaccataaatttgacaattatacatgaatatagttcacttttatacctcataataaaaaataaaaaaaatccagaataaaaatgaaatcaaaagtgcaaatgttaagaaagagagaagaaaacagcttacccatggttgatgcaatcatagatgaaaggagacctaaaacacaggagaatggtaatgaaatggcaagagcacgaggtcccaaatctgaaacctggtaaactagaaaccattgtgtcagacacacttatatttcatacaaaacagtagttataaagttggcttggtggttaaagggagaaggggggagggagaggttgtgggttcaaatccctcccactaacaaaaactaacaaactaacaactaacagttaattgttaacaaaggaaaacaaaactagaaaaaataaatgaagcatatacagcattatccaagggctctcatataaacagtattagtaaacatggccttctagtactaaataggcaaagaaatagtatctccctttattccccagaacacaggtacaaaaatgtattccatgaataaattaatgagtaaattgaacaaaataataaaatacaaagaaagccatttgtttaaatttggacctacaaactgcctaaattataaagcacttttcccactccttcagcactaattttaaacttaaaacaagtgatcttttgcctttttaagatacagataggatttgcttcttacaaaaaacagaaaactatttttatttttttaagaaaaagcaatttagagaaacacaaaaaaagcatacgactgcttattttattaaaaaaatattttttttaaaataacttttaacaaatgggccctaagtatgtgttccctgttcttatgccctaaataaaataaaataaaatccttcatctgtaaactgagaaaatcgctatactcccagtagatgaggttatattttcagaattacatactaacaactacagattggtcaaaataatctttcagaggcaagtttctcatgtagatggcactgtaacaattggatgcaataagcccaaaatcataacttgatgtaagcagcagttagccagttaccataaacttcagcacagatacaaagaaaaacataccagtagttgctctagaaaacaaaagtacgcaagcatgctgaccaagataagtactggtacatcctgccagatcctgttatgcatgaaatagatagaatacattacaattagaaaagtagtgattggctgatgatttatcataggttttgtagacataagaagggtgatgtttatgtctttttaggaggggtatcttaggtagatatacaaagagattgtaatgtgttacattacatgtatcatgttcttagtttttctctttattccctttcatttttggtttagtttttcaggatttatttattatcctctaggttttgacatgtctttttttattaaatgattctttgtttatccaaaaaaaaaaaagcagatgtatatgttgttcaaaatcagaatcaactgcatgtctattagacagcccatcagccaatagcttatggagtaggcttttcagtgtgtttgatgggccttggattttcccccataaccaggaacagtttcttgagattaattcaaaaaatttggcaggagcagagggtaaagttttacaggtgtcttgtacactgtcatttgggtcttaggatggagaagagatgcttggttattcaaggtaaatatcattcaacttgatgtagaacattattgttctgatggcatcttattggagttcagcacatcgattcttccaagggggttgcttagacggatataaaaagggattggatagctctcttattttctttggtaaagtgaaagaaggaaatctattctttgtaatcttttccttatattctttcttttccttaaaaggaacaaaaaggatgccaaacaataccaagaggcaagagcacatcttactgccacagtgccacctacccatatgtgcaaataaactgaaactgaagctttttaaacttaacaacccaaaatagttaagatctactactttatatagttttataaccagcctggttgccctaatatcatatcatagataacactttaagtctcctctatgtcagtttaagtgttaattgaacacagatgactaacacagtgaagtaattaaacatacctgtaataaactatttctgactgttgtggcacatttgatgcctgcctagcaagagtttgaggattataaattttcaacagtgttactgggaggttctggacatcctgcttgcagacatcacaggtcctgtttcccttaatactaaaccactttactgcacattcttggtgagcaagtgcaagatcacctttacaactgcattccatcttaagtgtattccctccttccccaagctccaccaaacaaatcctgcaaactgcttgttcctctggaatatcctcagtagcatcttcaatggctggaaaggaaagaacagagtgaaaagacacaaaggagggggaggaggagggatttaagcattcggttaacaagataatacaagccaatgagaacagtatactgattaaaaaatttatgtattctatgaaaaattctagtccctatttaacctgtttctatttaaataccaagtaatcctaactcagaaaaagacaaaccataaactaaaaccctaagatcaaaattgagaatcaaaattagaagttaacatcaatataaacttcattcagtattatcatttctttatttaatttggagagtccactgcaatgaaatgaaagggttttctttagattatctctaggaaacctctattctctttcttctatattattgttgctaatttcatttaatttatggtttagtgctcaactcaataataaatacatgttgcttgtcaaaatgacagaacatttcaaattatgcacattgttgatcaagttcaagaagtttaaaagggacatttagaagaaaattttgtaaattccatatattgaggaattaccaatctctggaaggaaagcaccatcagttaactttccaccaacagtttcaagatgtcgttttgccgaaattacacgaatcaagcccctagaatctgtaacccttaaattagtggctctgccattaactgggactgaaaatgatcgtgtcatatgctgatgaacttccattgtctgttcaaaaagaaaaggcatatattaagcaacatgtgccatttttcacttacaaaatgtgaataataagtacagtgtaaaagtagttgttttggtcttgaaactagaatgaacactggaaacatacacttaaatcagaatcacgtcctagatgtcttccatgtccattctctacacctgaagttgcaaatggagtaactggtaatgaatgtgaaacttttgttaatggggagataaccctattattaagagacagaggagttgaagtggaaggtttgtccaaaggagcatctgatgggggagtgttaggaactatgagacctgtcctttcaatatcctgggaacaggtatttatcttgaagctcctatgaggaagtaaacctctcattgaagacctgactttggctgaatttggccttggggggagtcctcttgtggaaccaggacttgatcgtgaaaccaaaggaccatcagtctttgcaaaagtagataatgcaatatctagggaccatgctggtatttgcagtgaggataaattaggtcgtctggactgaggaatctgggagtccttgttactcttttcatttccagtacatgtctacaatgccatgccatcaaagtaaaaaattcagagctggacatgtttgtattccttttatgatggcatggtgtgataactaataattactttagtctatccagttaatctaaatactaaaacattagtaatctaattctaatcaattggttaaaaaatacagattattggcactgccacacccagacccccacaaaaaataaaaacaagatcttgaatgaaaagaaagcacagaattaatttagtagtcacattacgattattcagatcaaaacaaacccagggtttcatttctttaagaaaatatttagagtaacctggacaggaaccggcacaaaatcggcatcaagttgaagctcagcatcagcaccgtcacctctcttttccatccaaggaaacgctttggcaaaactgttacagtcacggcatcaaatgcccaaacgccataatgtgttatattatatttttatttttatttaattatgattagcattataataatagaagggaaagaggggtgacaatgatgatactgatccgaacaaaggttagggttcctttgattcagataattaattttttaattaaccaaaatcgaaagattattcgcttttttggaatagttatctcacgattattacccgccaactgcaactcgtgacatgccaactttatgatccttccacttctcccacgattctccattctacgtttttcctctttccttcctctgcacctcgctcacacacacttttcttggagtcttcagcctctcaattttttgcaatttttttcctcttttttatattgtttcaaccataatttttttataaaaaaaaaaacataaataaaacgccagtttcctatattttttttattaaatgtaagggctggttttgacctactaaatgtgaaaaactctttttgaaaaataaaatatttatatatctttatattgtaatgtaataaatatttttaataaaaaatattgcttttaatttttaaatacttaaaattaaacggatattaacaaaattgtattttatgtaatttcaaaatattaaagttaagccacatgaaaacaccttcaatataggtcaattgttatttccatatcaaacttataaaagaggtaatgagtcactatagtggtatgacttttttatttaagattttaattaagattaatttaaaattatccttgagatctatgcttaacacaatacatacaatttgaaggatgttttttcggaaagatttgaaagtcattccgttggattcaaggttgatttgatgattgtaggaagaaaaaaaatgtttaaactcatatactaacaaaagaaaattgaaattgtaatttagcattttttataataataaaggttaacttatattttttatctactataatggttatttcttaaatctaatctcttgttttcttttaaattgtacaaaaatgggttaatttagataagttcacataagcatgtggctaataaggtgaattttcaggtacttaaaataattaaacttatttttaatttttactatattaacaaagttatttttacaagttatagaccattggtctacaagctcataaattgtgtggctaattaggttgttacaccttcaattatcgtttcatgtcccattgtattttaaaaagtacaacatgaaatgtaaaattatattccaaaatgcaatgggggacaagaagaaataattagaggtgcagaaagttttagccttagaagtagacaatagttaaatggatgacttgtgtttaagctgaaatgcagaattgtaggccttttcacccccatctggcgagttaaattttattttgaagaaaatggttaatcaattgaggtgattgaggaatataaatatataattgtaagaagagttaaagaatgaaggcaattaaaggaaggtggtaagcaggtggtagaataatgaagcataaagtgaaatattttgatgtttagcgtggaagggaagttgaggaaggtagaggggagtttcttgtatgtagaagttggattagaatttgaagtccagtccactgaattgaaggaagagcccaagtcagccacaaccacaaccacagaagaagtcgcagatacttgacagtgtgtgtgtgtgtgtgtcattcaatattcaatatttcatcccaaagactgcttcctggatgcatcctcaaagaaacacacatgactcatgactcgccaaacaatccacatacatccccccttccctcaatcacacctcattataacatcatcctactcttccctaattaaactccaacattctaaatgatatcaatattttcatttattagtatctcccgtaaatatttaaatgatacacacctatattatatctcatcgatctcatatataatcacactatctcagtaaaaagaagtcatttaatcataataatttgtgtaattaattattttcttaaaatatatgcggtgccgaaatttatttttctattaaatagataaagtttatatgtaaaacatataaaattaaaagttcagaatacaataacaacatttttttattcactacatgaatcacatgttattattgatttccattaaaaaccaaattacgaagaatattatttatgatgactttctatctccatgaagtccttttgatatactactaaaaccatccggtcttgtttcctgtaaactcaccaaaccatcttgaaaaattcagtgtctgcaaaagaaaaaaggttttttttttctttctattaattaaatattattgtctgacacatgaacacgtggtcagtaaatgaagggcgaggatattgcattgcgtttgtaactatgacttatgagttatgacaaggaccaaggtgagcacagtgaagaaggaaccataaataggccaccaatgcacatttttcttcccatgtcattctcattccctccatgagtgctaccatgtctggccctattcctaatgatcactggctccatttctatcaacaaaaccaattcccctcttccgtttccgacgccacaaccgtgacaaccaccgccgcgccggcccagctaagcccagaaggcggagtctcaaagcccattagacggcgttcccgggcctcaaggcgaactcccaccactctgctgaacacggacaccaccaatttccgggccatggtgcaacagttcactggagccccttctgcgcctgatctgtttgggcagccaatccctgtgaacccaaatggcctcatgttggccccttctcagtccctttatcagcaacaaaaccacttagcatacacagatggtggagacaacggtttttttcagagactgagcaacccaacagcaacagctccaaataatgatcgtgctgatgaggttttcgtggaccatggcggccgtttcttcccaacaacttcttcttgaatctttcttgtctgtccaataggaaggagcttttaagtttcttccgacagcgataaattaagcagatatttaggtgctaacttcttgaccaaccctatgtgaaatggaactatatttccagtgtagacagccacctgcacctgtaccacactttttcagctctatcttattttttggccttccttggttgaaatcgaatccagctatgttctttttttctttttctgaatttatgctgtgtcggcgttggcttaagcttttgtttgttttccttttctatttaaatttgtgtatttgttttctatgttaatcttaattgggaccttctctttagggagtcctagcccgattatagttcaattattttggatatggtaactcggtcaggcctgccactacctacaaattcttttacgtgtgttgacttgcttccttctttatatctctctctgtaacaacgttattcacacaataaattttataataatttattttttttatcaaattacttattttattccaaaaatatcaaatcacttatatgatcttttatcttatttttagtttaatttgatcatttgtttttttaaatataatttgatttttttagttcgctttagttaaaaattggttatttatcttaattttttgtttcaattttaaaccaactttttttgttaaaaatgaagtgaaggaaaaagggagaaaattgaaaaaaaaatcattttaaatgataaataaagttaatcttaaataaattaaagatcaaattgaaaagaaaaaaagataaaagatcaaactgaacaaaataataaaataaaaaatcaaattgaaccaaaaaataaaataaatgaataaataatttttttaaaagatagaagactaaaatgagctttgttaaaagataaatgaccaaattgaaataaataaataaaaagataaatgatcaaataagtcatttaatcttaaaaatgattgttggacactaattaaattattagacacctataagaaagtgatacaaaaaatatatagatatgatatgataaaaagagaaatgatgagtgtcaataacatatattaaatgaattctttgataagagttgacaaaattgattttaaataaaattaattttgattaaaagtgattttgaagtgatatgattaatgtttaaatatttttattttaaatttaagttaaaagtaaaatttagtataattttttattcaatacaaaaattactcaaagttaattcaactcgatgcatatctgcttcaacattatgttgaacttgatccacgtaaacttatggacacaaatttagcatactactcaatcaagtttggattcaaaatcaattataaaaaaaattcaacatgaaaactaaacatgtgaaaaaatacctaaaatcaattatggactcaaaattaatttttaatgtaaaactaaacatgcactaaatgaaatactgtccaaataccattttctattttattatatacttttttattatctcttttgcatgaaagttaatataaatttgtattatatataaatagcattcattatctctctggcctttggtaacgaaaaatgtggaagcaggaagcagccctctctttataatagtaaaatctccatggtgtggaaaaaataaatttatttgaaattaagtagctgttaacaagtgtgtttggacctatttcatctttgagtttaggatgagtcaaacattatttttcagttgacgatgatgtttgatataagaggagtgttaacgacattttttttttgtaatttgttaaaatttattgaaaatcacttattttgataaattttacttcttaattaatgtttctctttcctaaatttattgaaaatttataattttcaataaaatctaaaaagagtgtcactatcttgaattgtgtttcaaattcaagtttaattggaagcaattgaaagtatttttttttttttttgtatgaacactatcttgaattgtgttattttaaacattacatgtcaaaatcaattttcaaatatacgcggaaaaaaatcatacgactgatcttacattaacttaaaatcaattttataaaatcacatgattcaaactaattctaaagacatatatccaattcatgtatgatgcctacaatatgcaaaagatataattgatgacttcaatgggacatgaaaattcacgttagattgtacgagtaagttgtgattttccttcccggagctagcaacgctgaaaaagaaagtagaacccgaaattaagtgaataaaaaggatatggtatttttcccatctaaaattaagcatatgcacaaacaacactttcttgtataccagcattcaacacgcaaaattttgaccacaccagcaaaatgaaagttcccttgtgcaacttcaaatccactatccaacataatgcatataatattacagatatcgcacggacagttgctattgacattctgccgagaacccaacaactccaccgaagtatacctattcttttttctcatctcttccattattttgaggattaagctcatcatcatcataatattcttcaaaatattcttcatcactatcatcctcctcatcataataatactcctcatcatcgtcgtccttatcatccttgccattttgtagacgaagtgtgccatctcttgactgctgacctcttaacctctcttgaattcgatccctaattgctgttccctgtttgtagatccaagtggtaacaataaataaaaaatgagaagttaacaagaagtttacatacattagaagagttgcatagctttttcacataaattagctcaccatcttgtggcaaccttcttcaaacatttccagaaaaccagctacccaacgatcagcattttccacccactcattccgatgcataccagcagtctttgcaacaatttggatctggataaaccacacaaagatatgtatctttaccataattgataattcaattaaaaacaaccgagataatttcaatgtatgatactgttatatattaagtattaagcgtacataaaagttgaaaagagaatacttatgtccacttattatgtaaaaagcataggttttaaaccatagcctcatctatactgctatatacaaagcaaaaaccgtagattagtttcatcactttcaatttaatacaacatctccctcacaccccgatatacattagcaaaatcaataatttaagaaagctgcttcctaataaataaataaataaaaaactacgtaccccaatatccgaaggctccaccctatgtgcaagtaagagggagggatattgtatgcagtcttacccttgcatatgcaaagaagttgtttccggattcgaccccataaccaacaagtcaccaagacacaacttttcttaaagacaaactcagaaagagagagagatgcaaaaatagtatcatttctctatttttcttttacaagacaactacaataaagccagtccatagtttttttcactctctagtatcttttccgtgtaggcaaagaattttaatgttggccaaatattaatatgagcctaataaagtcaaggaaaaaaattgaaacaagaaatatttggaatcagatgtatagctgacaatagagaattatgccaaagcaaactagtaactgactgatatcagtttcatggcaataaatcatacaaccactaattaccagtgaaactgtgatctgtgatgcccgacagtgaaggtttgacaaaaaaatggggagaaattaaaagcaatattttctcattcatccaggtttgtcacactaaaattacaatgataagttaaaactatattgaaaaaaatatatagatataaatttaagaaaaataagaaattcaatctgcaaagttctctctccccccccccctccacccacccacccacccacccttctctaattacacaatagtaatcaaacagcaagaagatccatgaagccaatacatttacttaaatataaaaatatacagaggatatgaaaacaaagacctatatatataatgaaatttagcacaatatgaggaatgcaattttcgagaaggtatattcaattgatttgataatgttaggactccatgattccgaattaaaacagactgcatggttcaaaataacaattaaaacaacatagccatatgtcaattcagattgggttggtttttttgttgattttactccttgataatgtttttgtccttgaaaaagactccgagatccacaaatgcaatacttagacaaaattgtgaagataaaccgttgaatccaaaaaccagtagcagatgcccaatgtcccataacagtttgaatgacaattgtacttaactatgaatttttcaaagcactttacctgacattcttagctcctacttcaacagtcgttacattacaaatttacaatctacatgtgattttcatcctacagccctttcatcccatttaattcacatgatgttgcctaacaaaagtattaattcgacttgattacctaaattatatgttatagcaatacataccttttcgccaactttttcttgatgttccttcactttctcttgtaatgttttcaaccttctattcaccctcagtcgcttttcctatttatgacaaagtaatgacaaccacaagggacaagagcattcaccaaaggaacaaagagtggcgtcaatataaggtcaaacaatttgctgaaagacgtatcatgttaaattttaaagtagaatacatcaaagagatctatgtcaaatcatgccttcacatagctcacgccaagctcgtttcttgagtacccacgatccaagttccgcagcacatattggttataatctttgacaattctcattataacatctgacgtggatattccttcggtccgttttgtttccttaaacctcccaacagatttaacctacatacaaaattcacggcacatagtataagtcagaggagaaagtaacaacgaaataaaaaaataaaaaaagttttgccatacatacaaattcataaacatcattggcagcaccactggcatcagcataactgtggacaacgggttgacaaggggaaaaaagatgattatattatgcaatgaagttactagattcagatgttgatgttgagagattaatcttacggaagagagtcatgagccacataatcaatgttgttcttgtcaagaaactcttgattgataacccaaggggcatcaggaataacttcatccacccatctgatctcaaaatgaaatcaaactcaaattcaaattcaaattcaaatggttgaagcaacaacaacaaacaaaatatcatacttgcagtggcgcagggattcgtatcgttcggcctctgtcataacagttttgcctttgtatttgtgggtgacttcatcgttgcaacacccaacaagcaagtatgtattcggaaacctaaaatcccaaagtaagagtgtctgtgaatggaaccttgaagaaatgacttctattaattaatggattgatataaatgaaatctattatcagatctcggaggcaaagcgaaggatcaaatatcatatgaggattaggaaatgattgatgcatacgatttcttggcttgctcaagggagcgagcgtggccaaagtggaagagatcgtagatgccatccgcgtacacccgaacgggacgctcctgctcctccggaggcgacgccgttttcgaatgctcgctctgatctgccattcgcctcttctattctcttctccttcgctccgcctctctttttttcttctctttggtaataaataaatcgcaatttcgctcgcaaacgtcctatgcgctttttcttcactgttttcctccgaaatgttctttttcttaaaacgaagacgaagaagagtactaaacgattgtttcagagtaaactatgtttttctcttataaaaaatgctttttcattttcatgattttgttccttcaactttttaaagacttcgttcttcaacaatttttattgatatcaaaataggccgaatctggtgagccataagtaagttatgttttctaaactcagcatatttttaatatattcagtatattttttatttacaattttatccttatacggattatcaatctgtataaatcatatggattgattatcaatataactcatacgaattggtaattcgtagtcatacagattgtcaattcgtaaacattcaacacaaacggatgagaaaaaactcaaggcagagaagacaaaaatcaatgaaagcaacgacgaatgacgaaatagcagacgaaccacgacgttgggtgcacgaacgaatggtgaaggtggagaagaaggagaacattgcgcaaacaaaaacagacaagaggagaagaagaaaaagctaaatggtgtatgtccatttttacaaagggtatttttgaaaattaactgtacaatgctaaatgtattgaaaatatgctgggtgtagaaagcataacccgcctagatgaaaaattaattttttttgcaatgtgatgaaattgtaattcggctcacttaacccatgatgtttagacaattgaatttgattttaagactttggtattgtaagatttttgaatgatatttaggaatttaagacatttgaattattacttgaatgataatattatatgtttgaatgattatttgagacatttgcctattatttgcattcgtatttgaaccatttgaattaataaatgtcgttgatgaaaaaattattttaaaaaaatgaaaaatgttataattttttatttagaatttactttttatttttataaatttggtgagtcaacctatctaatccattaattcatagtgaatcatgtcaagttgatattttcatgactcatttaaatatgagttaaattaattcggttatttaacactcaacttatgatagatcaatctatattcatcacacttatttgacacttctactttttttatttccaatgtttagatcattttcatttattccatagttaaatgatgatatgttatttatttttattataattcattttttggcaactcaaacgctaggataactttttaaagattataaacatattctatgggcaagaaattcttatatctcaaatccaaatccaacatttatacaatttcaaatccagattgaaagtttgaaacacaaaaataaaataaaaacaattcttcaccacttctaaactttttctccctatctttactcccaattcttcacaacttcacttctccctctcgtcctacccctctcctcctaccaccatcgtttttcttatttttttatttatttactagttaaagatgttaaaataaagaaaatcctaaaaatatttcaaaaatctagaacaaataagaaaaacacaaaattcacattttttttattcttcactcaagaagtgttctcatccgccactggtatcacgttggcgtatcccacatcatcaattacttttattattataaaaatgaagattttatagtaatttaattaccataattgaggatgagtttgtttaaattttaaaaataacaactttaaaattggtatttaaaaaaaaatctaaaacttaactaatttttttatctttatattaatattctaattattcgtatacttatcataattccttgataacaattaacttataattactgctatcatgatttaattatttataatttcaaattaaattgataataattaatctaaggttaatagctgcacaggtcttcttgtttgggaatgttttggttggcagtttctttctcaaaagttttttctgatgttattctatatgaatttggttttcaggattcattggtggagactgctcaagaggaaaccagttcattaagtaatataattgcgcaaaccactaagtgatgagatcctattatatagggtttgtttggattggtgttagttccatccaacaccaatcttttgatactgccatcccgttgaatgtgcatcggaatgtacgatttcagtaaaacaaacacactcatagttgttgccattttttttgggcatgatgcttggtgtgattgatggacttttcctgttatatagtttatgtctaagccccatttttattgctgttacgttgaatgttcgattttttatctccttgattctttcttttttgttttttgtacaatagaaaagaaaaacataaactaagttttaacaggaaattttgatcttcttgatctgaattccattttctgaaggttggcaatttcaggtttgtgtacgcgtgaccgacctgtctattactggtaatctgtatgtttgaggaatacttttgctttgtactttgaaattgaaatcctgtgcttgtcaatttaatcttttgtttttgagttgttagtcttgaatgatgactgcataatatatgcatttggatcacagcgacaattcaaaaaatatatttttttaaatggaagtagcaattgttagtttttagattaatgtgatgtatattttttaaggtagagatctgtacagcgtcagtaagttaaatttagattataataatttttgttgtaaaataaaaaaatgtttaaggaatgttggtcaatttaggtgttggcgtagaaggggttcggctttgttacctagtgtaatttattatattgggtaatagtatttgtacatcataatatttgacattattttaataggtttttatggtaaatagttatttttgtttttaaaagtatgtgatgttaataaattagtattagtcagttcgcttatatggcatgtaaggatgaaagtgtcacgaaagaattatcacgtggacatagagactaatttgttagtaatgattttttttattgcttctccttttgattgttagacttgcaatgactatttttttccctctatcttatatattgttctccaagaatgaaggactgagcttcttgttcttcctctctaggtgtttttttttttttatctcaccttcattcatttaagttactgacaaatacgtcattaaattaaataatttattgacatttttgtctttctaagatatacaaaaacgacagcttcgtcttcagtggaggaagaatggtgctccttcacggtagtcatggaagtcgtcagaagtctcaaaaggcgagaaggggaaggtgaaaagagaaaatgtaacaaattaagggtaaatgaccttgtgttttgagtttgactcaagtagtaacacaagaaaaaattatattgacattttagtcctacgagtcatcgtctcaggttcaaccaatgaatgtcatgtgagcaattatttcgtgacatttttgtccttacgagctacgtaggtgaattctctaatgttaatggatgaaagttgacggtggaatgaatttttctcacttttacattttcaggaactaacttttgtatttttaacattcaggaataaatttgttagcgctaaacacttttaaagataaaaatgataatttatccatatttttatttcatggaagaaaaatattaaaagaatatggtaaatatcattgtgattcttacatcagtcacaaaaattaatttttaacgaagaagtgtgttaataacattgttgttaaaaaaataaaaaagaatattataattaagatcatgtgtaaagcatattctgtttagttaactaatattctcttacgttttggaaagcgacttatactgtggttagtctagagtggaagcacaatctccacatatgtcaattcacgtgcagtccaaataacacttattgaggacagccaacgcacatgtccacatatgccaatgtcacaggctgataggtgatagcggttcatgataaaatgatgcgttccataagttgtttttttgttgacaccccaatcagcatagattttgatttagacatgcaatatttcccgacaaattcacgttctataaagaaaagaatttatttaatctccaaatattattatttcattacgtagtcacgaagatgaaggaagatggccgagtggtgttaatttattccttccttgccaagcttatgatcaaccgcgatgaccgtatctggatcagtgtgttgcagtgttggtaatgaaactatataccatttgacaccacaagtgctgcttacacgacaggtagccatgtatgaatatttctcctgatcatagtcacgaagatcataaaagatatttctcgaagccctctcctttcatcccggcgctggatttatatttaagaggaaaaaggaagaaaaacaatcaacaacagcatatgacatgcaatgtacttaatttcaattgaaaaaaaaatatatagtgaatacattagctacttaaacatgacagaaggcatccgtctaatttacatgtgatacaaaccatagattaaaatagcggcgttttagtgcgctatctcgcttcaacagcgggttgcggcacccagccgctacttctatgctgcaacgcgacggttttcggaggcggcgttgcgtgtggcagatcttgtggcactatcgcaccgctatttccatggaagagaaaaaattgcaaagctttagccatcggggggcagtgttttgaaaattaaagataggttaagggttgcagagaagacgagttgcagagctcctttgccgttgcctcgtcaaatccatacgctggcgccgtcggcccctcaccgcccgattgccgcgaccaagggagtaccacttgtcgcggtaggcgtcaatgagggcgagggtttcatcgggggaccagcacgacggagggagatggcgggaggagggtggtgcagggatggggacgagggcgaggggaacggcagtggggggatcgggaggagggggagaggaggccatgggagagagggttgagggaaagtgggtgtggcctatgggtatggatcgaggaagaacgaaagagaagataataatgcgatgaggcttatcactgacacaatattgagagaaagtgggtgtggcatgtgggttttggtaaatggtttatcattgcaatctccacttcctctgtcaatgtcaacactcatttttattcaccatttaaagcaaaatattttttcctattttttattcattttaatgttatactaaacatttttttaagagattaaataaaagtaatgtttataaacaagaaaattattatatagagaaataaatcttttaatatgaaggtacaattaaataaatattaataatatattaatattaataaaaaaaatatttttatttatttattttagagttaataagcttgtttattttaaaaattattaataatatatcaatattaataaaaaatataagtattatacttttcattcctcatttcttcctatttttgggtaatttcttaacttataacatttatatatgtaatataatttattataagtatttttaatagatttcacagtagcagttttaccgctacccgctataccgcttagcgtttttgaggtcgactgctactgacagctacccgctatttaaaactatgatacagactaaactggaaatgaaattctctaaaataggaccattgtgcatgaaaactggctggtctcgttttgtaagccaaataatgctaatgagatcctatcccacatgctttccaatatatctaccactacagttacaatgcttgaaaaataaaatcaaactatttgagaaaccgcctatcagaggaatgcttaggggtaagactcaataataatcatagttgcaagtttgccttataacaccacaattccaagagtcttgaataaatgcatcatcaacctcacagacttcttcatgagataacatctccactatcacacaaaacacttttgctcttaattgttcggtttcagttttatcaaacaagccccaagagttcaagactacagccaaattatgtaaaaaaggctgagctggagaattatacctcaatataacagtaatcatcacaccatttcttgtatcaggagtaaaaggtaggatgaaacttgtgacactattcaactgtacatgaattgaatgagttgttcatcactgaaagaagtgtttcaaatgaatgaacaataacagttctagtcatgtatgtgtacactggatgaacttatgctggtcgtgaaactatcattggttataatcaatcctatgactgctgtgtaacaacgaaccaaactcaattttttgaaagctgcccactgcagagcaaccaacagctcactttgataatatttgtcataacacattcatttcagtcactagattccaaaatcctatttaaattggaattgttgcgtggcttataaccagcatccttcatgtccatagtcaatttgtccaagatataatatatctcaccactttgagggtgcttctcacctctggatacaaagaagttcacatgcccagcaatctcaacccaactacatcccatttccttttgcaaacctttttccttcatctgatttctcacactatcaacattttcccactctccttcctctgcatagatatttgagagcaaaacatgatatccaccaatccttttatctgtttccatactaagcaacttttcagcaataaattttcccaattcaaagtacccatgatttctgcaagccccaagaatagatccccagatttctattgcattaccatcctcacccaatctctggacaaactcataggcttggaccaccctcccaaccctacctaacatgtctgcaacacaacaataatgttcaattgagggcttaattttatgtactttgtccatatactcaaatacgtgaagaccttcttcaaccaaaccactataactgcaagcagacaaaatggcaacaaaagtaactgcatcaggcttaatccaacatctcagcatcgaatcatacaaggcaacagcttccttacccattccatgctgaccatagctcattatcattgtggtgtatgtgacagaattcctctctggtgttctgataaaaacattttcggcataactgattgcacccaatttggaatacgtgtccactaaagcagttcccacaaaaacattttcgtccaagaaatgatgtatggcaaatccatgaagttgcctagcaaaggtcgtacttcccattgaactacaagctgggagaatcgaggctaaggtcactgcatttggtattaccttgtgaactaatgcctctctaagaatgagaatgactttgtcactgagcccgttctgtgtataaccagcaatcatagcattccatgtggccagatctctatcacttgggcagttctgctcaaataacaactcagaagtcctaatcaacctggatttcgcatacatatgaatcagataactctccataccctcaaactgtatcccgtggcgaattaggtatgcatgggtttgccttccaatgtaagagctcctcatgttggaagccgcagaaagaagggccatcatggtaacggaatcgattggaaacttctgcttctgcatctcgcacacaagcatgagtgcttcctcatccaaaccattctgtacgaaggaagaaattatagtattccacgaaacagcatccctttgagacatgttatcaaaaaccttaaaggaagtgtcaacaaaattgcatctggagtacataaccatgatagcattgacaacaataacgggagtaactgccaatttttttagaacaaatgcatgtagctgatgagccgatttaatttgctgcagcagcgaaagagcagagataacggacagaaaagtgacctcatcgcacacggcctcctctgactccagggctcgaacgaaaacatcaaccccttgaagaggacagttattttgaacataaccaccaatcatggtattccaaacctctgtattttttatggagcaacggtcaaaaaccatcctagcatagtctaagcaaccaagattagcaaacataacgattgcggagctaacagcaaagacgtcattgacatagtcagcaccaaatttaagaagcaaggcataaaacataagagcggttttaggatcagggacagcggggaagacattgacgaaagtaacgggcgacggagtaatggaagttttaatgagggttgcgaaggcgcgaagtgagtgaaggtgtctgtgggttttgacgaatcatgaaatcaaggtgttccaagcgacgacgtttcgtttgggttgggcataaaggagaaaactttgaggacgtagtcgtgttgggattgggggggcaagcaggaggagtacatgttcaagagggagttgtagacgattcgagagttggatggggagcgaagaaaatgggaatgaagggccttaccggcagtgaggttttgggttagggcgcaggccttgagggtggaagagaaggtgtagcaatcggaaggggtgtcgggggtggacttcatttcagcgtagagctggagggcttccaacggcatgtggttgcagatgaagccgatgatgacggtgttccacacagcggtggaggcgcgtggaagagtgtccagaagatggcgtgccacgtgaggttgtccctgttggcacagtttgcttaggcgagaccgaatgctaacgccgcggcttggctttccgccctcaacttgaacaggaggaacaggaacaaccgtagaagccatgaccctcatcctattgctatttccttttgttgtcacactcacatcattacctcttctatccatataattacagtaaaattgtcctactacttcatcaattctaattataggatcacaatagaatgtttataactactaaaagagaaatatattgtaattataaggataaaatggataataaacctaaacaaataagagtataataatcatacatccacaatgtaaaagtttttttttttttttttatattatcaaacaattaaaaatcattatcaatataacttttacaatgattattgtaaaatttaataaagttatcacacactattttattttattatttattgatttacttaaaaaaatattgacacccattagaatacatttgttatattttactccctccagacttaattaaaaaaggaaaaaaaaaaggattgatgaaagcaaattttaactatttgcatcctatttaataatatcatcttaaaaataatttttaattaattgaaattttaatcgaagattattttttattcttaatattaaattaaaaagacacttaaaaaatagtttttaaattttaatactaattccgatcctttacataaaaacaaatcataatatttttttcctaattatagaatgaaacatattattgttttgaaatgtattaataattgatatccttggtcttgatttattgtgaaatataatattgagatattattatttttgcgtgaaagtaaatgcatttatcaaactattaacattatatctcatactcattatttcttaaattattagtaatgttgttatatacaatcgtcactttaaactaattagttctataagcatatttaaaataaattttaaatttattaattaaaattaatttatctattttcatttattttgacgaattaaatattttttatttatttatagaactgaatgtattattaattaactaaaaataaattaattttgtttatatttgagtttgacaaaagtataagtaaaaaaaaatagaataaaaaacgtagtccaaacacttgaaaaggtaaaaacttaaaataaaaataattaaaaccatacctaaacatgtaaaaaaaatcatacctaaactaaaatattaaaattttaattattttcatcctccgttgattagtatcgagccccgagaaagtaggaaggagaagggtgtgtgactgtgtgacagtgtgagtgtgagaataaagaaaagaagagaagattgcatttgcatcaaattgaagaagatggaaatgcagcaactcctcagtatgggcttcccggacgagttagccgcccaagccttggctgccaccggcggcaaatccaccgtcaaagccaccgaatggattctctctcagaaacccaactcttccacattccagcccaagctcgatcgcttcttccattcccagtcacaatcacaagaacatgacgaaccctccaagcgccccaaaccttctccttctccttctccttctccaccacaaccacaacactcgccctctttcttctttaagatcgcagacaagaaacacgccaacagccacattcacgaacccttgtacgagcggttgcgtcccagaacccttgacgacgtcgtaggtcaggagcatctcctcgctcccaactcccttcttcgctccgcaatccaacgcaaccgcctcccctccatcctcctctggggcccacccggcaccggcaagaccactatcgccaaagccatcgtcaactccaccccttctattaactcttaccgcttcgtctccttatctgccgtcaccagcggcgtcaaagacgtcagggacgccgtcgacgaggccagaaaactcagactcaaatccaaccaacccaccgttctcttcgtggacgaggttcacaggttcaacaagtcccaacaggactctttcttacccgtcattgaagatggcagcattgtcttccttggggccaccaccgaaaacccttctttccatttgatcacccctctcttgtctcgttgccgcgtactcactcttaaccctctccaaccccatcaccttgccttgcttctaaaccgcgctgtcactcacactgaccaagggttgatgcagagcgtgggggttcatgttgatgtgagcgaggaagttgttgatttcataagcaacaactgtgatggggatgctcgggtggccttgaatgccttggagattgcagctgttaccgcggctgcaaggctacaacaagggatggaattggatcttcacacgaacgaggaatgcaaggatgctgctgctgctgctgctgctgctgttgttgttagtgttgctgatgcaaaggaggcacttcagtgcaagcatgttgcttatgataaagctggggaagagcactataatgtaatcagtgcgttgcacaagtctatgaggggaagtgatgcaaatgcagctatttattggttggcaagaatgttagagggaggtgaagagcctctttacattgcacgcagactcatacggtttgcaagtgaggatgttggtctggctgatccattggctcttaatcaggcagtctcatgctaccaagcatgccacttcataggaatgccagaatgcaatgtcattcttgctcagtgtgttgcttacttggccttggcacctaagtctgttgctgtttatcgagccataggagccgctcagaaggcagtgagggaatccgcgggacagaatgagggtgtgcctctccatttgaggaatgctccaaccaaattaatgaaggacattggatatgggaagggatacatctacactcccgacaatcccaccgcaacacaaacttacttgccaccatcacttctgggccacaagttcctcgattggcctgagtgacagatacggagttattatgtctttttttttttttttttttttttttgccttttggttttggggtagtaaggagaagggtgcatgctgcattgcaaacgatgtgtgcttctttgtatatttttccaccattgctaagaaatatattgacaatggtgggggtgggggaatgctaaatgctagtgcaatgcatgatgtaaattttgacccaattaaatctcattttcactaatttacttttgaattttattttattcttcaccataggccatacctatcactttatgaaatatttaatttaataattgttcgatgagttcattaaaagtggatgtatgtggcaaattaaaggatcttacattcagcaattgcgcacagatttttcagtaaaaaatatgatatcaccttcaacagaattaccaatttactagtctgaggtgtgcaatactggcattaaagaagctgccttttgttttcttacataggattgaggagttacttgtagaaagaacaatggttggcagtaggtatactacagacgcatcctagacatttgtaattttctgcattttcacgctttaaacggatgactctagcaaaacacgtgatttacaatccacctagtacaacaagctaacattctgactcatcataacaagcacttgatagttgatatacaccgaaaaaagaaacaagctctcttattattaaattaaaaagctgacaaattgggggtcaactgatgaattagatccattccttggggttgatgcatgcgtccaagagtttccattcttcgcttccttcttctggtttctgcatacaaaaggtcaccaacatttcagtagcaatttcataaatggaaaatttaagtcatctaacatccaacttgtttaaaataaagaagattccaaaatcgtacatgatcgtattcccaccgagcagtcagtgggagagaaacaagtatactttctattctccctccagttttcagtccaaatgttgtacccctatcatatacctgtggccaaaaatgttatataatacaaatctgatttgaaagagcagagcaatacattttaagtctaaagttgggttaaaaggtgtaccaaattgaattcaacatatcgtccccttcgcaattgttgccatgctttctgatgatcattgaagggcaaatccttccttttctctatgataggtaaataagcaggaataacagaatttgcacattctgcaagcaaccattgtttgggcagcatgagatagagagaattatatgtctttccagtgagaaccatcagatttataaatgcaagtaattaccagtagcaaaggaaaggagcatctcctgatcatagtcattaagatcatcaaaaaatattcctccaagccctcgcctttcacctcgatgctgaatgtaagaaataagaggaagataaggaaaaacaaccaacaacagcatatgcccatgcactcaacttcaatttaaaaaatatgtataatgaatccactctaaccccttaaacataaaagatggcctccatggcccatcaaattacgtgttatattgactcaactccggtatactcaaacgggagcactgtctatgacaactgacaaacaagagactgaaaacagattaacaattttaaaccttccgacaacatcttcctagtaatcctcctatttataagatgaagaaagtatcaaatgtttcttatgtgttaaggacactaagtagttggcataaagaagataagatagggtaagctatcatatcctattttaatctattgtttggtgagtcgattagatatgataaacttattctattcctatttgttcatcatatcttattcattaattcgaaaattatcctaaggggagagtaagattctgaacaaataagattacatagataaaatttcccttttcaccttcatctcacagtgtgcaactcctttgttccaccaccatcaccaccacaacactgtccgatgtcactgtagccagcataatcgccatgatcaccaccactaccaccacgatcataattgcatagtcatcatcttgcttcccctgcatcacatatcttcttcccattcccatcatttcattattactgacagtcattgctgttacccatttaccaccatttgtttcttgcttattaattatgacagcctccaattcatcatatattaaattcatcaaaattaaatataacagaaagccaaattcatgagtaaacttctattaaaggtacatgaactggacatggaatgcttaatactcactcatcactgttaacctttagactttagttttatcaaacagatcctaagactgctaaaaattacagtattaaaagcttcattgtgggaaaaaggattaagaattataccttgatataaaagtaatcatcacaccatttcttgaatcgggggtaaaacgtaggttcgaacttgtcacaggtttgtttttgaatctacataagaagcatgatttaaagtaagagagattttaagtgccttgattgcaaaatccttaagcatttgccaaaacctttcatagaaatataaagagaaacaaattcggtgcttaacatttcaatgcctccaattttaaatgaaccaagatacataaattcaactaaagaaaacccacctaaaactacaaaaatatattaaaggtactctcaaaaaggaccaaaatcatcaaggtgtggtgacattttagaacaaaggaaattgatttttttctttcatcttttaccaagtaaaaaagccattattggttctaaaccataaaaatgtcagaagccaatacttgtgctaagcacatactgaatggaagtgcttaacatcctcctcaaaaatgtaagctggtgtcaagtcagttcccccaccaaaccaccattgtctaggtgctccaggagcatctgcagaaagcaacagcttgactatcaatagcagcatatttaaaaaaggattcaacaactttatgctcttatgttaacatctctttggtttaatatttgttttaagattttgagacgaacatatagatatagttgtgtttttgtttttttgtttttatttatatatatatagttgtgatttaatcataagcaactgataacaaatagtaatttgaaaagaaaaaaaaaacctacaaagttgaacccgaggtaaccaagcttgaaaaagacggagcagatatcagatcatattagcttctatacagtaatgaaagattaaacagtcccaagcacacaaacaaagcccaaacaacaggaagcaaaaagacaggcatgaaagaagcagtataaaaagaaattgtgaatcacatcacatgagttgaaagtaatatgacaaaaaatactgctaaaatgataaaaagaggagcttggaaatgagcaaagcaaaatgtaatttacctttaggagcatcggtttcaaaatagcgatagttgaaatgtagtgtaggggcaaacgggttctttggatgtaaaacctgaacagaaagacaatgagggaaaattaattagtccaagaaaaaaaggcaataaaaaaaaatgagttgagatggtagagagatactaacagagctgattccagcagcgaagaaaggcacaggaccaggtttttgatcggtaggagcacccttggcagcacgatatgcgtcaggtggcatgacaccgtaaacaacagagacattaaccccagccttctcccaaacggcaccgtcttgaaggaccctgctaatgccaccgccgccaccgggcctggaccaaacgtcctccttgaacttggccccaccatcagcggcctcgagggcactgcaaacggtgtcctgggcctcccttatcatcttctcgaagcgggcccgaaccgaagtggaagactgggcctcgtccactcctctgagaaacgtatccggacgctgggcctccggggtctctttctctatcgaaagggtggctcgcactaggccttttctcattggaggtggcttccaacggcgatgagtgagcgagatcgtagttggagtgatacaagtagcggaagcggagctagagcgaaaagggaacgcgtaggacggagctgagacaatgctcgcacaaggcattatgcttcggattggatttccgacactccaatttgattcgatataagctctgaaaatgaaattcccagatgataaggtcttccttcctttcaaatacttgcagttataaataaataaataaattattttaattttacttttgccacttggtatttatctggggacaaaagggagaagaaagcatggaaatccaatcaacctcttacgttggtttggatgtgcaattctaccttgtttttgtcttctcgatttatgcagaatacaggagttgactatttaatttacataaacggctttactaaaattaaatacagtacattttatttaccaccaagcgacgcggtaaactcttatcttggatttttttttatttataatcataattatctctacttcaatgggtataattcagcgagcagtaacaatatcatgagtgatattagttttgggtccaataaagtagaagatgtctgtggtcagaccaaaaaatagtaaaatccaaatatgattagatatttaaaaaatccgtgtttaaataaatataccaattaatacatggattaaaaaagttgttgggatttaactccttccttagctatgacatctacattatatgttaattatatgttagtccaatagttttttattgcattcccaattatagtaatgatatgaaggtgtttcggcttagttctaaacaagttatctatttttttctctctttttctggccttagtgggatcttcggtctcctattctggtatggaatgaagtacctgtacaaagaatttcgacaatcaactcagttagatcgaaggtttttctaatttaagtttttcattattttttaatttacaaaataaataatggtctttaatattagtaaaaaatatataaaaaatataaaaaagattaaataaaatcatatctaaaaatataaaaagattaaataaaactaaaaaataaaaatacatttatttattaaataattaaattaaaaaattatttaaattatttgaaaaaaaacaaactaagtatataaataaataaataaaattacgactttttgaaatcataaaaaaaactttagtttacgattttgaaatcttaaatcagataaaaaatatcaaatcgaagtcattattttagttttaaaaaaattatacaactttaatgtcattatttttttaaaaaaataattaaaataaaaaaataattaaaattataaaatcataaaataattaaaaaataattatacaacttcaattttaaatatatatatatatatatatataagttaattatgacttttaattaagaagtaaacctcttgcggctgctacctgtttcacataatagtagcctccaattggggtggcagaagcgatggcattttgatggagtatagagctgggagcgcaactgttattgtttagagattgcaaatggttggaagcaaaaaaatttgccccctaaatcttattttattttagttgtatctttgagaaatttctattaaaatcatgtatgcaaatccttttttccttataaaacctgaataaatatttttttaatcaatcaaacaaattttaattatttctaaaaattatcattttcagaatttattatttaacaataaaattcataattttcaacaaccatgatttttttggcataaaaaataactgtcaaatgccctccaaaagtgtagtatcattctctcattagatttaagtctcttttgttcttttgtttgtttctatagaaattgaatccacacaaatattaaaaggaataaaatataaatatcaaattaatattgtggggagaagaaaaataaagagagatgttttattttcttgtactgaaaaaaatcccctaaattggaatgaaataaaataacattatttcattgttttctaatctaaaaataataaataatttaattctaaaaataataaataatttaatttttaaaatatttttcatatattttttttatttccactattcttataactcaaaataaataaggatgttcatgattataagtcatttgctattttaacttagtcaaatatttgggttggattttttttgagtgtttaggtcaaacttaatccaactcattcatgtttaaagtagatcatgagttttagttttaaaaatgtgaactttatttgttggttcggttgattaataaaaaataataactatatatgtatatatttaaattaaaaaaatattattattagtgataacaaccctgtaaagttctttaagtatgtattgtgtaatggtaaacaaatttttaaggacaggatgaaagttcaggtcccacatgatgttgcaaatcaattgaataatgtaggtgcaaatattagaattgtcgtgtgtttggttgaattttgaagtgttgaattgtaatagaatggggacctagatttgtgtaatatgtatgattgtttctgtctatattatttatttaaaactacattgaaatttaaaataaatttaaatttttcatcattaatcaaacttaaattaacccatttgcaacttgattcaatttgaattggattaaagaaatatatacaaatccaatttagtacctaaaattaatatctaaaggttgatttggattgaatcatgaattcagtgacatccaaccccaattaataaacacccctacaaataagaggagaaaaagcttttaacttgttttttattcctaataatacatgtttttctttcaatttcacttttttttttgttctctttatttcacttttgtaatgtacttatttatcaaggtaggtaaatgtaaggactttgatttcagaaccttatatatatatatatatatatataattttaattaattttttgttaataaaagatttttaatgttaaaacagtactctaaaaaaggtcggaaaaggaaaaatgaaattgtaaaatgtcaaaagtaccccgggtctaggtttttctctctcgtccaccgccacgccactcttcactcgcagattcaaacgtttccgaggtgaggctgaggcatctctctctctctctctctctctctctctctctctgttttctaggtatgtgtggttcgtcaatttgaatttactttcaggtaactcttagagttggattttgagtttgggcgaagattcatttccgttaccattattctcccatgccatgcaaccttctctgcttttgctaacatttttgcttttgttttttgtagaatgggagctgggcgtgaagtctccatctcacttgatggggtgagggacaagaaccttatgcagctcaaaaagctcaatctcgctcttttccctgttcgctacaatgacaaatactatgtcgatgcactcgcttccggtgaatttaccaaactaggttctactctatgcttctttctcacttccttatttccacattaatttcattcaccatctttattcttcctagttgttacatatttctttctccttgcttaacgagctactctactgggtttatgcttaccttgtcagggttttgctggggagtcaaatcacttggaatccatttgaaataaataaataaataaaacaatgaacgaactaatttttgttccaatactagttacttatttgcctccaaaaagcttcccatgattggggaatgatcacatggacaaaaagttggctgccaaaaaatatatttgatagatatttccttttatttgatgatgaagcagaagcatatatgtctatatcttggcctctgtattcccttaaggttttcttaagcttactgtacttcagttcctgcacaggttgcctttagcagtttagcttccttcacatattaaagctcaagattctaattccactgtaggatattaggtcttataatccattattaatatattatttttatctgaagatgttttgaatttgggtgttgcaattagtcattgcttacattactaatctttggacaaatgatttttttcaatcttacaaaataatatatctattggctacaaactaatccacgcattcactccagtcattcatagcaaaaccttttaaactttggttcattctttttttttttatttgtttaattcaagttgcacttggtttatttttttaattgatccgaatttcttgttcaattcagaattcttatttcctaccttttgcaatattcttcatgcattttgttttatcaaacataccctttgataaaacaaaatgcatataaaggatatgaaagcctttctaactttttggattcaaacatacccactccctttccttaacaatggggaaataaaactcctttgcagagttttgacaaacatgtgaacatatagcatagttctattggtttttctttttggtagatgtactcagtgttgttgttgagggtgagccatgacacaactgtaaagtcgtgccttagtgaccagttgatcatgggaaacaacctctttgcatatgtaaggataaggttgcatacaatgaccctcccccatactttcgcgttgcgaggagcctttggcaccagggtacattagttttttttttatactctgttgtcaaaattgcgagtaagatcaaaggatcgccttctgattcccttgcatgctctcactctataaagcctaatcacattctctaatctatctctggtctctctgctttctgtgttctgcctcccattaacaataatctgcattctacttccagcaccaacatctctgtttatgcctttgaagattttgccttcaaggggttcaagctttgtgcctcactgccttcaagcttctatttttctgcccgtgctttatgtttaagattgctattgagtattacttatgttatgtgactttttatgatttgtacgtaaccttatgattgtgaattttcaattttagtttatctaaatattgtgatttaggtgttatttttgctatctatgttattttttgtgtacgcatgtgtaagtataattttgcatttttagtaggatcttatgattcatgttacaatcctgggttatataatcttctactcccttcccggtcttagctaagatcttgattttgacaacattggatatgctgatggtttggagagctcatgaagtgatttccccccttctttttctgctttatttaaggagaatatgcactccctgtttgattttgataaatttatccatgcctagaaaaatgtacagagttatctttattggaatacaacacaagatgtcttcaatacttaatcatgtgcttttgaaagcatttggacttagagttagcatgcaagcatataatatttctttagtcgaaccagcttgtttgatatctctgtgctttcagtttgcttgatatatggatgatacagaaagaagggatgggtagacaaggagcctatagaatgtgtctaacaccattgagtactttgcctttgtctttcagcttactatagtgatatttgtgttggagcaattgcatgccggctagagaagaaggaaggtggggggcaagttcgggtttacatcatgacgttaggtgttttagcaccttaccgtggacttggtattggtaagaaagaaactgaatatctttccctggtgattgaaagtttaattgatcatttttttaatgaccttggtgtggatacctgtctcagtaccacaaatacatattaatggtttgtcataaggtgcatgcttcatattgggaacatgttaatttacatctggcaacaatcactgtttcaaaatttatcacttccttttaagctcgttatttttataaactatgcaagtgttgtgatgtgaatcttttggttcatgcaggaacaaagctattgaatcatgttcttgatctttgctccaagcaaaacatttctgaggtttacttgcatgtgcagacaaacaatgaagatgccataaacttctataagaaatttgggtttgaaattacagaaacaatccagaactattatacaaacattacaccgccagactgctatgttctcacgaggtatacggcaagcacaacgaagaaataacatttcagccagttattttgaggggaagtgatcagagattgttgcattgttttatgggttttgccatggatgtattacactaaagtttttttatgttcaatgctagattttaccataaagttagctaaaaaaaaagcagcacttggagatctcttgctaaggtactattatgctattttacccgcttgctctcatctccccccagtcttatcatttccatcaaaatactattaaactacgaattcggtacaagaatctctataaacgattatttaaaatggaggcgcacagagtaaattaaaaaaatcacataaacatattgtaaacccaatttactttaagctgcatcctgtattttaaaactacatctagcttgtgcgtcctgaataacacttgcatgatttgggcccagcaaatggctcgttatcaaaaataataattataattataatataagatatgagagggtctcatggccacgcgagccttcaattgggccccatggtcgtcactggccatcgcacgtcgactgtcgtgtctccgtgtctcttcgcatggttattggattttgtaattattttattttttatcatttgttttaaaattatattattatgtatttgttgtgttattgttttggactgtgttatgtttttgttgatctgtttttcttctttttctagatgtgtttcttcgtagaatcagttaatgagagaaacaataaaaaatgttttttttttttaaatatgcagattttcaggatttttttacaatcaacaaatctttaatatgaaaatcttgagggtatttctattggatcttagaagaatagatcttcaacttaaaatttctctccaagatctggatatggcttgagagggtcctttctacgctttgcaactgcaatcatcattaatcatcattgtatcttctgctgaggcatttgctctctttgctcaggattatcacctttcaccgtgggtttttggttgtgggaaaaggtattttttttttaagtgtatggttaaaaattataatggatgacccaatttgggttggataaaagacaaaggctacacaacataagctaaacttcttacacatagtggaaaaggatttcttagccgttagatatagtgggattaaaatcaatggttaaattttcttctttctttttttgtttgtctttccttctttacccccgattccatccctcttcttctgctatcgcttttcgctggtaacgagaggttgttctctacgccacacctcatggcgttgccactacgagcaataacgcacttcgcccccatgatctcctacttcctttcctgttcgctttgaacatcagttgtgcgaaggatcagatctaatatgaagaatcagtaccaagcattggcatcatcatatttgaagaatcacatcctaggagacctgtgaaggactttgtggtcgccgccgcactctaatcgcgaagggaaccttgccgccggcctgcagcgtttactcgttgatagcagaagccgagaagacgccattgataacctcaccattcattctccgatgaggcaccaccgcctctgtggtccttgacggtagaagagcgaagggaagagaagacgaggaaagagaaaaagaaaaggataaactaggaagcaatcaagggaaatagaagaaaaagaaatctttgtttaaccatccattaaaaataaaagaatctaacgatcaaaaagaatttgcgaacggtatgcaagtattttaactaacgcagcgtaaccttcgtctaaatatgaaactttgtgagcaacttatcttcgaagttagaaatactagcaaaccaaacacgacataatgtttagctttctacttaactgaaccttttgtcttctttttgtaaaccaagcatacttatctcatttttttagtatttattggtttacttctatttgtttcgtgtccctctatttgacgttaaaataataaaattattaagaaattatatttatcaggggtgtctgcgatacatctatgtttgatttttaaatgaaaaattatccaaactaaacataaaattcttgggattcaatctgatttcatgtgaatgtaactaataacaaatttgaatcaaatcaatccaatattttttttatttttaaaatttattttcacaagacttccaaaattattttaatttgataattgacaaaataaattattccaatgtagagtgtaataattgagtcatgatcaacccttaaaaatgacatttacataattatagtaaatgaagcaaaaaaaaaatcacaggttattataattacattacaaacctattcttcaaaaaaatgcattaaaaaccattcatagttaattattcatggagtgtctcttttttttaccattgtttttagtcacaaaaatacataactaaaaaaatactcaacacatgaagttacatattttatcatcaaaattgggccatgacttaggttagaataatgaaaatttatttggaggcataaaaaaataattaaagtataatgcgtgatttacaataggtataaaaaataaaacctaattgcaacaaaaatgtggtttctttgtttgattatttttagtttttttagatcgatttactagtttaaagtgattagattgaattttaaacatctctaacacaacaaacataggcaccaattcataatttcatataaataagagtgaagataatagaaatgtaagataaaatgaatgatgagatgcaaagagaaagaaaaagaaaaaaaagtgtcgtataacttattatataatttattattattatatgaacacaatatcttaaaataattttcaatggcagagaagaaacattaataattattttgacatttgaacgttacacacggatcctaggtgttttatttattttctaaattgtgggctatggtgaaatgatttgatggaagaaagatttatgttaaaaaaagaacacgtggtatagagttgagagtaaagaaaagtagagaagggaagatattatccacaggaggcggggtgagattagatgatgattcatgatattacgtgtataaagctggttggagaagtagatcataatctcatcctcaccattcaatatccaccaggagttggatactggtcgtactattagtgggagcaatacatatcattcattcctagctaatcctctgcttgtaaattaagagcatggctgcacaagctcttgtatcatcatcatctcttaccttctctgcggaggctgcaagacaaactcttggaccaagatcactccaatctccatttgccttctccagaaaagcctcctttcttgttaaggctgctgctactccccctgtcaaggtctgtaattcctctctcactccatttgtttttatgttttcatctatctacacttgtacttaatatataaaaaaactctctttcttttggtgttcagcaaggatcagaccgacctttgtggtttgcatcaaagcaaagtctttcttacttggatggcaggtaaatttcatcctagttcatcactaacataatataacgatatcatcatgtctggatatataaacttctcataagcacttaaagaataaaaaggtgaagtgaagtttatttcatgagttaaaacataattaagttaatttatagtagctctttcgcttaatttctccaaaaaacttatgaaagaaacttaattcattttattccgttcctggaaagcttattcgaataacacttgtgtgtatctattgcaatttagaagagtagtaaataatgaattactatgttggtgctgaaattgactttatctggcatcatgtgcattgcagccttccaggtgactatggatttgaccctctgggactttcggaccctgaaggaacaggagggttcattgagccaaaatggctagcatatggtgagatcatcaatggtcgttttgcaatgttgggtgcagttggttccatagcacctgaaattctaggcaaggctggtctgatccctcaggagacagcactcccatggttcagaaccggtgtggtcccacctgcaggaacctacaactactgggcagactcctacacactgttcgtgtttgagatggcactgatgggatttgcagagcacagaagattccaagactgggccaaaccaggctctatgggcaaacaatacttcctaggactagagaagggtcttggaggttctggtgagccagcttacccaggaggacctttcttcaaccctcttggctttggtaaggatgaaaagtccttgaaggatttgaagctcaaggaagtgaagaatggaaggttggctatgttggcaatcttgggttactttgttcaagctcttgtcacaggtgttggcccataccaaaacctcctagatcatttggctgatcccgtgcacaacaacgtcttgaccagtctcaagttccactaaatctattatatcttgttcgcttcgcagttaccaaaactcaaccatcatgtggacattttttgttccttggtgtgccgctgtaagaattgacatgtaaaacaactagaaacattccacatctttcttttatccttttgctcgttagattaaccgtacccaagcttttatttatttcagccttctgcattccaaattgcactagtctgaataatgttacaattttataaactgtatatgttgtgagagaatttttaaaaaaatcatctttaaataattaatctagttaagattggatctcgccagaatgtagttaaactggaatgaatcctatactcaaatgtgcagcttttaaggcaatagcttaactcccaacatttgtttgacggcaacctgaaatttaaacagcaatcaagtcacaagatttttttaattttgctccacaattatgcatttgaaaatcgttttaattctttactattttgagtctgaataaaaagaattttttttagtagacaaaactcatttaccacgactccgcgagggagaaaaaaagactaaacgctcttgtagagttttattttattttattccatgcataaaatttaaacatgtaactttaagagaaattaagttttcttgtcactcgaaccaaatcacgatataaaaatgtattattttcttctataacttcgaaaaaattcttaatctcattgtgatgtgtattttgcgtggtcagaatttttcgggcgagattatatgcataaaaagacaaaaactgctggaagaacaaggaccaaccaattggtgtgatttcaaaaagaattaaatgaaagttgatatttggtataattttattaaggtttaatgtaatttttttttactatatcaatcagttaaaaattatcttaagggggcatttattttacgtcatgttattcctctattctcagggataccaatgtttgttagaaggttatgagaatttataaccatgtatattgtattcccaggggaatgttatatcttcgtgtttcaagcaaattctattcccaagagaggagggaagggtatatgatattctcatgggaatataactatctattctcattacatcctgatattctctttttacttttacttttttacatttttaattgttctacaattactaaatgccaactaaatatgtatatggaaataacattcttaggcataatattccccggaatgtgattgccgggaaacaaaattatggtggaatatgattatgtgaggtgtaggaagcaaaagcccagagtttcctaagaacaaaaaaatgtaaagcaggccgggcgattcactagagggtccaacagataactaaaaacagagtattgaggcgaaggtgggcttgagtgggccataccgtacagcaaacaagtatcattttcattttggcgaacgagtgcgaatctttttctcttgcgttgttattttatttccttactatctccatctgcatctacatctgcatctgctacgttgtgttgagctttgagatctgtctcgccaaaattcatggttcctttcctctctaaccagttctcttccttttccctttgcaatatgttgctcatgatgcctgcttttgcttcttgttgctgctttttctcctgcatcgattaattttacattcctcgtgtttttgcttctcgttttgttacttgttagctttatcaatggacttgtttgctgctatactttactcttgtgatctgattctcggttttaaagcggacctgcatcgcctttttttttttttctgcttcaaaactattggatctgatttcaatatgttgatatgattgttattgtttattattttgtgcttgcatttggctgtttttttttttctttgaaaatatctggcctctcatgttgaaatgtttattccattgtagatttcgtgttgaatgcatcgtcagagttaggttaattttttgacatttggtgtaaaatggaggtgccaagtaggagaaaaccagtgatctactgggtttgccttttcgtcattgtcaatgcgtttgtacaaattagcaatgcattttatcttccgggaagctacatgcatacttactcaaatggagatcagatatatgccaaggttaattcattgacttctattgagaccgagcttccctacagctactacagtctcccttactgcaagccccttggtaaagtaaagaaaagtgctgagaatcttggagagctcctcaggggagatcagattgataactctccctaccttttccgcatgaatgttaatcagtcaatctacctctgtactacgaccgccttgaatgagaatgaggtaaagctactgaaacaaagaactcgtgatctgtatcaagtaaatatgatccttgacaatttgcctgttatgaggtttgccaatcaaaatgggattaagatccagtggacggggttccctgttggatacacaccacctgatggtagtgcagattacatcattaaccatctcaaattcacagtcttggttcatgaatatgaaggaaatggtgttgaaatcattgggactggggaggaaggtatgggtgttatctctgaagctgacaagaagaaggtatctggatatgaaattgttggctttcaggttaccccttgcagtgttaagcgcgatcctgaagtcatgacaaaactccacatgtatgacaatatctcttcgacaaactgcccatctgagctagacaagtaccaaccgattaaagagcaagagaggatatcatttacatatgaagttgagttcgtgaaaagtgatataagatggccatcgcgttgggatgcttacttaaagatggagggctcccgggtgcattggttctccatcctaaattcattgatggtgatctttttcctagccggtattgtctttgttattttcttgagaactgtgagaagggacttgacaaggtatgaggagttggacaaagaggcacaagcgcagatgaatgaggagctttctggatggaagcttgttgtgggtgatgtatttagagagcctgatggttcgaagcttctctgtgtgatggttggggatggggttcagattcttggaatggctgctgtgactattgtttttgcagccctgggtttcatgtcaccagcttccaggggtatgctgcttactgggatgataattttatatcttttcctgggaattgctgctggatatgtcagtgtacgtctatggaggaccattaagggaacctcggaagggtggagatccatttcctggttatctgcatgcttttttcctggaattgcttttattattctaacaggactgaattttcttctctggggcagcaaaagtactggtgctattcccatttccctgtattttgagttgctcttcctctggttctgcatatcagttccacttaccctcattggaggatttatggggacaaaagctcagcaaattgaatatcctgtgcgaactaaccagattccaagggagattcctgcacgtaaatatccatcatggcttcttattcttggtgcaggaactcttccatttggaacccttttcattgagcttttctttatcctttccagtatctggcttgggaggttctattatgtatttggtttcctgttggttgttcttctattgctggttattgtttgtgctgaagtgtcagtggtcctcacatatatgcatctttgtgtggaagattggcggtggtggtggaagtcattctttgcttcaggctctgttgctctttatgtcttcttgtactccattaactacttggtgttcgacctgcagagtttgagtggacctgtctcagctatactttatctcggctattccctgctcatggcaattgcaatcatgttgtcaactggcaccattggcttcctgatgtcattttactttgtgcactacttgttctcatcagtaaagatagattgaagtttgctttgctatctctcaccaactaagcaaaaggcatgctggaagaggaaattttcttaaatagtataacttttgcttaattctttttgtagcttgattgctttgcagcatgttgagtggggaaatagatgccttgctgattgcagtaattagttgccactcaattttatgttgctatgcgaactacagtttgttccactctctatctgtctctcccgtaagttgtttactcattcaactagtgtttggtatcattctgtttcatgtgatttagttttgtcaagttgtttgaggaagttgtaatttgcacagactgtctcattccttattcaaatatcaagaaaaattaaatggatacttctaggtttcttcaaggtatccatccactgtgcttttgggtgttcgaatgttttgtgttcaaggataggaaagtgacttattcgttaacatgatttttcttagttatccacatacggcttggtaatatattattattattattagcaaaaatacaggcgtgtgtctatatttctattatgttatcatatttttttatttaaatttatttggtcatacaatataataaaatataacttagattatttctatagaggcaactctattatgagaaggtgtaaaaaaagatacaattattattgttctggtatatcaacaaaagctatttgataatacacaattaagagttgaaaggaaaactagaatgcattatttcttctccgattgattaaccttgaaaaggaggagaaagaaaaaggtgaattgtcatccttatacttttgtgtctgtatttttattttattattacattttttgctaataaagaaaatgataaacttttaaatttaatttaaaaaatctcagttgtattaaaaaagtccttgtcatcatttgaaaattattttaaacataaatcaattgagtcaataaattaatcagtgaagcctcctccgaaatagcatccaaaataaaactaaaatgagcacggcaatagaaagtaaaaacatgaaaaagcacacaaaaaaaaagacaaatgcaaataaaccaaagtgatttatgcgtacatgacctatttttaaaagcactgtttattttagtgaatggaaatgaaaaatgaaaggtttgattcctgaaaaagagatgcagaggaggaaagggataattgtaaatgggagagagataattgtgaatgtgaaagagtcaatttgaagttatgttatgcacgttcatgaagtagaaattatttttgaataaataaatcggcgataactgccgtgagtgagtgtcaatagaaatgaggagaaaaaaatttctaaaacaagaggataagaaaggtaaggaaagtttgaaggggagatttacgggaatgagaaaaaggataaaataatgcagtggacgtgtgaacatagtagttgaagggagaattagagtttgcaattatattttgaaaaatgtaaaatatcaaattgtgtgggagaagttgcagtaagccagtaaccaacaccttttctgtgagacgcaacaattatttttgaagggtaaatttggaaacgaaatgtgtacaaaaaggggtaaaaggtcctgggagtgttgttatgaagtacgaaaaatgtagttatatattgaaagataaattagaaattaaaaatatgtataccaaatggaattattttcaatatacagattattattatttcatactacttcatactgagaacatacatatttgtcgtggatgtggaaaaaattaaataaatgtactgaaaacgacctgcaaaaatagaccagtctattagtcgctggttcatggaattggatcctgtgatgttccttttcgtattctggtaaagccaaaacaagtttaagggatcgtgtacaaataaggtgagtcttgttgtgatgtttgtgtctttatcttaagtctgagagagatatgcgcatgtttcttttcacgtctgattaacaatggacgtggaagctacaagttgtggcatcaagatgaacccgcatgatgtccctacgatgtgaaaccaaacacatgctaaatttgttttcagtaaatagttagtgtggagaggacaactggttcatttgtctgtctatctaactctcttgatactgtcaatctcatcacaaaaggaagctatcctctcctgctgctgatactagctagtatcacctttgttaggagttgagtttgttggttggttttcatgtatcctaaaaaaaagaaaaacgaagaaaaaaacatttataaattacaggtgttttgtataccttcctcgtaggttttgtatggttctgataacaaactcccggccacgctagaagtgaaagaattataacaaacctttgttataaggattgcttcttctggctagtattcccttagccatgctcttcagtttattgtttatccagtttggcaagttacaagagaaacttttgcgtggatcttgtctgcacaagctatttagactaaattgattggtactatatgcaaaattattttatatttgacacattacagaaatttgttttttgacaagataaggcatacacaataaattcactctagtttttctcaactagttattcaaataaaatcctaaaacaaacatcacgagaaaaaaaaaaaaaaaaaaaaagttgccagcaagttattgtctaacagtagaacattacaacattatattgggatgggaaccccgttccaatctccaagacattccagaatgggatcaataatctttgcttgacacatggctgtatatactttttcaaattcctcatctggtgagagagtcttttctccggtgagcaaccctatctctaactcttccctcacaaacttgtacagtggatatgacctacactcctttattctgtttggaattgctggattgccattctcataagccacccttgcactttcaacttcctttggcaagagagacttcaattcatcctcaaaagctccaatcttctcaaaaatcaacaagctcacattcttgtcattaatggcactaatgtgtgcttgctcataaagtacttgctttagttttggcatcaatgggtacgtaacattggagggatcatcaatgtaggaaaatacatattctctatcgaccactttaagcaaatctttctcacaaagtcgaaatgggttaatttcttctgtgtcttctgtaactaatgttttctgtgcaactatgcttacagtattcttgaccgtgttcttgaaaatttcctctaaatgcctcaagtcaatagcttggcagagtgcaaccagataagtggaagacatgagctttaatatctcaacggcttcgacagttttcaaagcagaaattaagcccaaagagttcacatcttggtcgtgctgctcagcactttgcccatggctcgttactggatttgctagatattgaagctcagaacaataagcagccatggcaacttcagatgccttgaaaccgtaatcaagacttgggtttctaccagcagaaagacttgatggcaacccattgttatacaaatcattgacaagctcagtaaattgggcgaagatgagtttgccgattgaagcaacggctaaacgtgtattatccattgaaactccaattggggttccttggaaattaccaccattcagagccttattccttgtgacatcaatcaagggattgtcatttactgagtttatttccctttcaattgatttggtcgaataccggatgatttcaatctgtggaccaagccactgaggagaagttacaagagcataacgatcttttctaggcttctgcaacggatctggttgttgcagtgtaacatttttgacataagagcttccatctagaatgtgttccataatagctgcagcttcaatttggccgggatggtacttcagcttatgtataagatgatgtgtaaattctggcttcccctatgcatgacttcagcaaaaactgctgacagaacttccgacagtaaagctaatatgtttgcctcaaaaagcacggtagaagccacgccagacccaacggccgtgccatttacgagggcaagaccttccttgggcttcaactcaaagaacccagaatctagacctgctaaatggaaagcttccttagcattaagggactctccagagggtccaacagctttactgtttcgcctaccagttagcaatgcaacaatgtaggacagaggaattagatcaccagacgcagtaattgtaccacgtaatggcaagataggggtgacattgtggttgagtagtttggtgatagcttctaagatttcaaatctaattcctgagtagccttgaagaagggtattaaccctcacaagcattgctgctctggttgctgatttaggcagtgtgtgagataactctgtttggtagccaaatattgcgcagtttaaaaaccttgggaaggaaaaatggaaaatccgtaaatacataaaccaaaagaagaattaaattggaatggaatggtctatatactgtcatataatatataggttgttgtcacatatataaaagtaagttgacttttataattgatactttgaaagatatatttgaaatgaattttgattagtattgacaatgaagttgcatgataattccaagatattgagaaggaagcagagaagaagcagacctaaccatttccttctgaagggcaaggccttggtcagttcttctgtgggaggcagcaccaaagccggtggtaacaccataaatgggagtgcctttgttaatgttttggatgatccagtggcagctggcgtcaacgcctggccttgaagactctgagagggaaaccttagcctgcaagtaatggttgggatcggcaacagcaacagaagccacctgtgatatagttagtgtctctcccccacccagacagacaagtgggttccggtactctgccaccatgcgtttcacttcatcaaagtggctacacttgagtgaatctgctgcctgactccagttaagggggtcactttctggaataatgctcgccataccactacgagaggagagttcaaaagttgtagagttttcagaggccttgaagctttaagtagagctagagggttgctgacatgtgtcggggtaggtgattaggtgcttctatctaccattcacccactcattttttgcatcttacaattgtagcttctcaaatactgtctaagtacaaacaaccagattaaattataaatttggtcactgtctgatattaattttagtttcaatcataactggcaaataaatttatattttactactctctgcataaaaacatatttcaatttttttcatacacggcatctaatatatataaaaggttttttcttttttttttaggaatgaagtagtaaatttacctggtgcatgggttgcactggtatttatgtatgtaccaaaatagtttgttggtttgtaaatataatgttttaattacaatttgatttgataaattatttaaattggttgttaataaaattttataaacataaaaatatatatttaaacgttttagctagaactcatatttttgaatgatttaagacacattattcttaaatcatttaaagataagaataacttcttcttttattttatcaatatgatgtgttgaatataaccgtataaattaagagatatatagagcgcaagttatcgtctcttagtagtattgtagtaatactactatataaaaaaaactttaatatttttataatctttgaccgacttaattatttgtataacacgcatatttcattattttaataagaagacataaaccttttccccccacgtgttgtgataaattcctgaaagtatacattttttatttgtgtagctaaaacaatgtattattgatagaaaataaaaagaaaagaaaagaaaaagacatggaatagtattagtaatgacaggtttcatgttcccgtaaaaaaaaaaaatgatgtttactttgttattacattacacgcagttaacagtaatgaaaacttaaaattagtaaacataaatgtatagaaatccgtgaaaggtaaggaattataaatgggatgtggaaattataattactctgaaaatcacatcccagatgtatatggtattatatttgtgtgtgatataataaaaagaggaagaaagaattatttgtgacgcatgcaagaaggtttgaaaaaagaaaactagccgttggcaagggtacttcatcatgtattagttgtacattgtgattcagtgctttaggctcctctctttcctttgcttttgcttttgcttaattcattgatctaaattctccttcctctctctgactctggcgaagatgttcaccgaaggactcgacgagagcgcaatccaatggatcaagcaggtctcctttcttctttcttctttcttctttttgtctaatctaatgctacctctttgtttctttttccatctttctttcttttgtttgattctttattagggattccattccttcactgaccaatttatacatacaatacaatacaatacaatacagggatcaaaagtaccacttgatgttgatgtcgaagagcctcctcttcctcagccacgctctcctctggccgagaaaatcagctgcagcagcgatcgattcccacgatctcctctcttgagcagtgccaactctcttaattctcccgttctccctcccttgaagttccactcggctttattacaaccgcgcaacctcgcctttgccgatcacgatgacagttacgaaagcacggaggatgccaatttctccgatgacgaagtctctgctcccaacaaccttgatttctcggactctccaataccacactactatgacgaggaacaattgtttggatgcaaaggccgcagaggaattctcaagacaggtttggccaatcaaaacctaaccattcaggttcccaacacagttagaaggttcacagatggagaaatgggtttcaatataagtcttcaaaggaacctcactccagctggcgctgccactgttcagcttcaaaagcaagttcaccttcgcaatgtgaattgccctgatgatgacaccgttggtttgggtactccaagtgcccctcccatcattgattctgattctccactggagagggattcagaatgctccctaaggaacgaaccaacttaccctcctggatcatggccttcaagagaatctctggattatgatggcacaaaaagtgagacttccattgaacaaaaacccaagcccaacactgttgctaaacccactgtcgctgagctcgctcaaaggtgctgtatttgctcttttttagtttgtctgtttgcagttctccttccaattcctaaccagctctagtgtccttccttataatattaaattcaactctgcagactggacaagacttttacagatgacagagaaagacagacccctcatttacaatattacaacaccaggtgctgtctatcttcaacttttactttctatttaacaattatcaaattagctgtcaaccttaacgaaatatttagtttagtttgaatccattaatactttgctaaaaaactaagtaccctgttacctggaggctccacgctatgcgcaggtaagggggatggatattgtacacaactttactcttgcatatgcaaagaagttgtttccggattcgaacccatgaccaacattaatactttgctaattatagcaaaatttaattaatatagttatcttgaaattcacatttatatgctcacttccttttatggcatgttatgttatttcagcagttgcaatagtcaatatgcctggcaaacccttatcacttatgatgcctgcatacgtttatgcctacaagcatgggcaaaaggctgcactgaggccccagagtttttaaaagatgagtgcctagctctccgaagtgctttagggtgggttccattttgttttaccaacacatttcttttggcttcatttattgttctcctcatttctgttatttctctatttccatagattgcatgagttcttgttgcaacctcgaggtgtcaagccaactgaaggcagaaataccaggaattcggaacaaacagttcccctgaagattaagaaagttgtagggaaaataagagtggaaggtaatcttacaatctcaacacatttttatcatttaaatgtaatatgattataattgtacatggatgtatggaatgacattttcttatggacatattttagaacttcctaatgtaactatgttcataacgttggatctccttcaaacaacttgagagctgtataatctgacatcctatatgaaaattgcagtgaagaaacttcgcattataccaagacaaaaacttaagatcacaaagtcacagcgaggatcaatctacatgcaaactggggtggagtacgtccggcatgtttcatcacttgtgaaaaatggcataaattctatgaagacggcctccttctccttggcatctgaaggtttcagcaactctttcgttttatagtttagaaatctttttgatcttgataatgagacttgtattagactgtaagagttacatattatcaggatttaggagtcatactttatcctccaccaaatgaaatgggcttttttaatatagatttttttcctttcataaacaccaatccttttaatgaatgaattaaaggtatctgttttattcttgtagagccactacattgttcgatccaacttaagagtacaacggaagaaaatgaatcagagccatgttctgcaattcttttgcgccctggaagtggagattaccatgatttgtaagtttcattttttttttacttttatattttaattgggaaaagtgtttttaattgacctgctgtttggctcttcttagaaaatagctaaacatgatagtcggtgaaggttttccaaatgcattttagcaggatatttatagtagtagacaattgatgaaaaaccaatcttaacagttgatatcatacactgctttatgttctaagtttcttccagtacacagcctagtgcataagatggcgatttacattgtacattctttaagacaactacaatcacatgttgtcttgatttcttcaattgttgaaattcgcataataatcataaagattctgaactctcacctactttcagtttcccattgagccaaggggacgctttaattgtagaagtccaagattcaaaaaaggtagtccatggtgaagccaggattccaatttcatccctcagtgataatcctgtatgagctctaccctttcatcgtccatggatattattctctctcttgcaccttccacattcacataatgaattatcttgaatgtgcagagtgacagaattcggtggtggccagtatatcatgatgaacgtgaatgtgttggcaagatccagctctctattggcagtacaatgacaagcgatgagaacaatcacataaaggttctgtctctagcaaaatttagttcaataaatcttgttttatctaatagaaatattcaagttagttgatgtaagatcatcttccaagttgacatctcaggactaaggcaaagaagtaactgtttaggatacatcttagatgtaatatatcgaaaaattgttctcaagaactagattctttctgagattaaccatggagaggatcatacttatcaccttgtttaatcatttgttggtattaaaaagaaaactattctaatttgatcggacaaaggatcttttatttatttattgaaaaggctcatcatgatttaatattgtttttatcttagtttaaacttttggccattaaacaccaatatcaacatttctggctatgctgttctgagcatagattcaggttttcatttgctcggtttgtacatttctgcagagtgcggctgttgtggaaactcaagcttatgatttattattggagggtgccatgcgtgcacaacatttccactcccgaaacttgcggttaaatgggccttggaaatggttgttagatgcatttgcggactactatggagtttctaattcatatgccaagctgaggtatttgaatgtgtgcccccaaaaatatgaaaataagaaacagttttctgatattctttatgctacatgattttcttttaatttcttcatttttcttcacttacctgtggtggttttcttgtagatatctattacatgtgatgaatgtggcaactccaaccaaggactgcctagagcttgtgagagagttgctagaacccctcataaaggccagaagtgagaggagtctgaccaggcaggaggtaagtcatatattgctctctttcccgttgcagtaatttaccatatcttgtaatttggtttgcttaatcttatgttgtttcagcttctcataattttaatatgctatgtcaatggcattagtttagagttcagaccaccttaatacttgtcatacatatctagaaatggatggtggtgtaacagttttctctgtttgcttgttctcacagagaagtatactttcagactgtgaaactcaaattgaaagtcttctagcgacagtttttgagaattacaaatcgctagatgaaaactcgccaacaggtttaacagatcattttggtccagcatttgatgctgctgcaccagctttagatcctgctgttcaagtctacacaagtgttcatgatattctatctctagatgctcaaactattctaagaaactatcttcaggtaattccaaatttgcagagttactgataactaatgctcttgttcaacatagtttcaaccatggatgtttgaagtatatttatggctgcatgtaaagcttggttttccttttttggagtctaaatgataaggctactgtcaacagactgcagcaagaaaaaggtgtagaaaacacatgatggagactgatgaatttgtgtcgagcacctctgaatgttacctaatggataccattaccatctcaacggcatacctgaagatgaagaatctttgtgtttcaataagaaatgaaattcaagcagacataaagatccataaccagcatacgatccatggtcagcatatatttccaaggtagttggctataacagctctctttagcaagttgacaatacagttaacagtgcatacaatttgcaattcaattctcacacataattataatgaggggttgatatttatcttttttacatcccctacatgggagatgcaattggtctttattaaatttaaacattctgcaactttcaattggcataacagaatgttattttctcctgtttcagtcagagtttctcattatcaacgtcggtacccattcatccaatgatagcattactcaaattctcgttatttttctctgtaaattttaattttggttcatcatagattttctgagttctattttccaattttcagttcaattgacctgacaaacatcacagcagcagtttacagcacagagctgtgcaagagactgagagctttcctttctgcattgccaccatcgagtccacaggcacatgtaaatgagcttctagttgcagctgcagattttgaacgggatttggaatcatggaatataaggtttgtgaaagaaacttctcccatgctaatgcaaaatgcagtataaaaaagacatgagattccccaacagtaaaatatcatttcttactcgcaatactcttcatgttccagtcttgtgcagggaggcgtagactccagaaatttgttccacaattatatcatggtgtggatacaggatatgcaacttagtttgcttgatttatgtaaagcagaaaaggtagtagttattttttttttttatatatacaacaaagcacttcagtctataaatgacttgacctccccaataatgacacaggtgccatgggctggagtaatcacaaaccactccacctccccatttgctgaggaaatgtacgagaaaatcaaagacaaccttacccagtatgaagttgtaatcaacagatggcctcaatactcactttatttggaaaatgtaagttctaaattagagatatttctgttaaaccatcagcattccagatatctttttctatagtgtctccctcctctcatatatataaacaattctatctccactgtataaaacatgtggtaaataccttgactttgcatttttcttaccctttctttctgtaaggctgttgcaaacattgaaagggcaattgtgaaatccctcgaaaaacaatacagcgatatattaactcctttgaaagatagcatacaaaagagacttcacttgcaagttcaaaagatagcaagaagacaatcagctactgttcatttggttcctaatcaagtaagttctctgtatgcttttgcattaggtccatattctaaaatccagcttaatttaagtactcaaattttaagctcactcaaacttttgtggcataatagaaaacatgcaggattttggtttcttataacattttgttttatccacagttgggaatattcttgaacaccctcaagaggattcttgatgtccttcattgtagagtggaagacatcctaaattcatgggcatcctgtctacctgtcatgggagataagaagacactgtttggggagcaaatgaatggaatcactgttctcttgagaaccaaatacaaaacttatttgcaagcaataatagggaatcttgtcaacaatgtaagatcattcaaactccagttttctacgtttgttctatgttatcgtaaaatggataacaatagtgagcataaagtttttgtttagaagcctcaaatatttatttacatttgatacaattgaattgttcagacaaaagctaatcggaacacaaggctgaaaaagatccttgaggaaacaacagaaacagatggagaagcagaagtgcgtgaaagaatgcagttgctgaattcacaactcactgacttcatctccaatctgcatgaggtctttaccagccagatttttatagcaatatgtcgtggattatgggataggatgggacaggtaaccaactattttaaaaactcctatattattggttcatatttttttctttctcggatctcatttattttcattggttttgtgatagattattttgaaatttctcgaagggagaaaagaaaacaggatatggtacaacggctcttcatatgctctgggggtaagtcaatattattagattattttctgatgatgttattgttgattgcaatattgcaccgttgacgttgattgtttcactttgcagatattggatgatacatttgcttcccaaatgcaacgattacgaggaaatgcgttgcaagaaaaggatattgagcctcctcgctcagtgattgaagctcgatctattctttgtaaagacacggcaaatgcaaccgatacatctaattacttctatatataatttagctttatatatatatattgccaaatttccttgctattgttgaaatgtccatccactgtacatgatcgtcaagtcaaatataaacctggtaacgtttttctttttggggggagggggattcattttattcttttgcatctaaatgtaataatgtactattgttcagacttcagaggttgaataacgtgatagagggctattattcttcttgttaatttcctatcaatctaaacacatgatgagagtgtttgatctaaagaaagaatccagaagaaattgcatagataaagtaagaaaatattttatatttatagactttttatttgtcttatctgttaactttatttatatttttaattaattttgtcttttattaattttcttttgttttttattactatgattttatttttcacatttttgtgtgtagttaagggattttatatatatatatatatatatatatatatatatatatatatctttttgtttttgatcatgtcatatttacagtattagtcgtataaatttgtattaaaattgatttttggatttgtatttggatgtttttttctgctgaattttatatttggattatgaacatcaaattataaataaatgacttaatcggtggttgataatgttagaaaatagttttattaaatttttgtaaggtttaagatgatttttcctcttaagagaagtttataaaatgaattttttatgtaaaccttaaaacatgcgttaaaaaatgaatttaaatatcttttaagttaacatgttttataatgacttcaagataatgttatgcttagtttttttccttctaaacaagtaaataaataaataaaattcattgtcctaaattttatttatttattaaatgctagcataaaaacaaacatcattatatatttctataatttgttaattttgaatataaatgtttaaaaatgataacaaactaaaaagcaggaaacatgatttgaattttttttttgttttgtaatttcaattagaaaaatatttggataatctttactctctacacatttttttatatttactttatatatttattcatttttcttatttttctctacaccacatatctaactttgaaatatataaaaaatcttcataattaaaatatatacaccccttagaacacagataattaaagatcaaaataagaagaagaaaatcaacaagtgatataataatgttattatttcaatgtttcataaatacatataataaataaaatgatattcaaatatataccacaaataatttgatgaattatgtataaataaacatatatttaaaaatataatatattaatttatcatgttatcataacaaataaataaatttaagtaaaattatgtatacattacaaaacatattaaactaaaaataatatgacatcaatttatagataataaaagatatcatttcaatatataaattttagcataataaagtaggatagcttaatagaaatacgaacacatatacagtaattactataattattaatgagttaatgattaatttattataaaaaaaagtaatgatcacttttttaatagttcaaacgtatcttgttattttaatgaatcagtgattattatttttagaggtaacgtatatttattattatccatgggatacaaagttacaaagtatgggctggaactggatatagaaagaagagaagcgaaagggcgcgagggggaaatggcgaaatgaagggagggaaagaattagaaaatggaaaatattcaaaagggtgattccctcgctccggaaaatccgaaatttggatattccactttctcacttttccctataaaacaaaaaagcacccgaaattgttggcagtggaaaatggcgcagcttccgtgcgactccgatggcgtgtgcatgcgctgcaaacacaaacccactccctccgaaaccctctcctgtcgaacgtgtgccactccctggcacctttcgtgtctcccttcgccacctctctccctttctgattcccactgggactgccccgactgttctgacacctccaatcatcaccccgtcgctccctccggtgaccttgtctccgccattcacgccattcagtccgacccctctctcactgaccaacagaaagccaaaaaacgccaagaactcctcgctggctctgccgacccctcaaaggacaaaaccaaaaccaaagacatttttgatggaagcttaaattgctccatatgcatgcaactacccgacagacccgtcacggtttgtttcttttgtcttctctgttttttttttttttatcatctattaatttttgagtagtcagtgtgttagtttcctcaatttatctttcagacgccatgtgggcacaacttttgtttgagatgtttcgagaagtggatcggacagggaaagcgcacttgcgccaattgccgtgctcaaatcccgaccaagatggcgagccagccgagaataaactctcagttggccatggccatccgattggcgaaggcagccaagtcgggaggttcttcgggtccatccaaggtgtatcattttgtacgcaatcaggaccgccctgatactgcattcaccacagagcgagccaagaagactggaaaggcaaacgcttgcagtggtaagatttttgttactgttcctcccgaccattttgggcccatccctgctgaaaacgaccccaccaggaaccgtggtgttctggtcggggacacgtgggaggacaggatggagtgtcggcagtggggtgctcatttgcctcatgttgccggcattgctggacagagtggttatggttcccagtctgttgccctttctggtgggtacgaggatgacgaggaccatggtgagtggttcctttacactggcagtggtggcagagatctaagtggcaataaacgcaccaacaagctgcaatcctttgaccagaagtttgaaaacatgaacgaggccttgagagtaagctgcaggaagggttatcccgttcgggttgtaaggtcacctcttctctctcgatcctaatatttttcattcgattaccaactaaatgcatttttctgagtatcacaaatttattttgtgccgaaataacttttgttttgttcaggtcgcacaaggaaaaacgttcttcttatgcaccggaatctggagtgcgttatgatggagtttatagaatagagaaatgctggcgtaaaaatggaatacaagtaagctacttctaatgataggcattgtgtttattgattgaggcctgggaatgtatttttccttgatagttttctccaagttttttgattcatggagaagctttgttctgtgacagggttgcaaggtttgcaggtatttgtttgtgagatgtgacaatgagccagcaccgtggacaaggttggttggttctttctttgctgctgtttgtttgtgtgcttatgtgttattgactttattttgttgatgtgcagtgatgaaattggagatcgcccacgctcactgcctaaaattgatgagttgaagggggcagttgatgtaactgaaagaaagggtgatccatcatgggattatgatgtaagtgttgttctggtcctttagctgttgataggttgatttgtgtctggtaggattaaatagtgagacaatcataattattgtactaaagagttttggaaatcgttctagtggtacatgttccactattgatgttctataatctatactttgatgggtctcactcagtacttttggtgaaatataggaggaaaaggggtgctggttgtggaagaagcctccaccagaaagcaagaaatcagtggacattaaatctgaagatggaacaacaatcagagttaaacgaaaggcaaaagatgtgtctgtgaaagaaaggcttttgaaaggtatgctctgtgtacatgttcccataatttaccctgtatagactacttataaatcttgtttgccttattgttttttaaaatcccattgcagtcaattgaacttgtaaaatctattcaattttgccactgacttccaatttgttcagagtttggctgccaaatatgtctcaaggttatggcttctcctcttactacaccttgtgctcacaacttctgcaaagcctgtttggagggtaccttttctggccaaagtttcatcagaaatagggcatgtggaggtggacgcactttacgagcacagaagaatgttatgaaatgcccatcttgttcaaatgacattgccgactttctccagaatccacaggtactactgaatgccattattaggttttatatttgctccaagtatgcttgcaaaccatatttggatttcttttaattattcctagtttacaatgaaatgcttatgcctattttttgaaaatatggaattcaattagtaaaacggttcatcttgaataaaggagaatggtagaaatatattaaggctttattttgagctcgtgtatatgctttttataaggcttgaatatttgttgcaaatactactggcactaatgaaatacattctggaatttttcattcattgtattcaaattggcattttatttgtaagttttgttctacaattttctggccttttttgtacaggttaatagagaaatgctggccgttatagaatcattacaacgccaggctgaagaagaaaattctgaagagtcaagtgataaaaatgatgaaaatgtgcatgatccaacagaggtttcaaaaccttgtgattctagtgataaggtgttggaggaaattaaggacaatgagctgaatcagccacacaagcgaaggaaagagtgaaggatgactgcaagttattttggtcctttggattatggattttcattaaatagcaagggacggactgctgatgcaattgttttttagtgctagcatagattgatggattttgactaatatatggatttaaatatattttttgtgcgttatgatcggagtagaggttcatgtgatagaatattggtatctcctttattgtgggtttcatgtctctagaaggagagaatgaatgcagtttacactgtaatgcatatcttaatgcattctgtgtttttattaaagatgttatgtttactactacatttaaacaagtttaaatttaatattgacttctggtgtaaacttaaatgaagagccaagtgataaaaatgatgaaaatttgcattgcccaacagaggtttaaaaaatgatataatgataggattaaaaaacttcatactactacgcattgtaggtacacagaagtatacacgaggtaaattctgagaagtttccatcctttgtgggacatcaacttgtgaatgtagcttttgattcaacttaaatttgctataattggctcacaagtatgtttgtctaaatatcttgcatcaacttgtgaatgtagctcgaggaaattttgaagatttgagcaaggtgaggtttaaggaattaggtaactaaatctgaaggtaagctttgttatcctctaactcacctttttatccaatattataggattctttttttttttttttttttacaacgttttacccattaggttattagaatacataacctttttttttttttaccgatttagcatgtgtattgttatgatataatttaaattattgatggattgaaagagatagaaagttgcattgttaggaatattaagttgcatttatatatatatatatatatttttttttgaatttgatttatgataatcagttataaattgttaaaatttaaaagcttaagagcatattatgataagagaatattgaaatgaaatgaagtgaatgttagagaatgaaaatctaaagtagatgaacttatgcgttttgtaaactaaaagatcattatcttttcacttaaagagaatcaagaatctgaaccacgtaggtcaataagttacaaagagagtcgaaaaggtaaatctagaagactgaaaatgaaaattcgaggaaagtagacctttaagtttaattattattacattacattagtagttacaaagaattttctaaccaattttatatgctcatcagcgctgaaatttcaacttccaagtaaattaaaaaaatgaaataattacgtagatatgttatgggttaggatcatttgtcaaattttgcacaatgatatatttaattattcgctcgaattgccgcccttctcatgtggtctgatactcggacacgtttttgtattttatttaaagtattagttgactgacttccggtcgtctctcaaaagtcttcgttattaattataatgcaaaaatgattttttttaataaataagaaatcaagaatcagatcattttcttttcttttctttttaggatttttcttacggcacctattcagtaaccacagactaatttctctgtttgataggtaaaaattatttattaaacaaatttaagtcactttattaagtaatatgtacgagtattataaatatttttatattgtcttctgttcttataaataaaaaaattaagattatttttcgttgataatgtttaccatttttaataaataacacgtattgagaaaaatgataacttagtatttattattaatatacaagattgaactctttaagatcttttttgctctctaagttaatactgttccacttccatgtatcatttgaaaaaacaaaataacactcttgagatgtctataagtctattgaagaagacataaagaaaaagaaagaaagatgctaatagtaattgagtaataagatgtaaattgtaaagaagcttttgccataagctttttctgcgtaacttctaacacacgctgaggaggacatcccctatttatatctcatttcaccatactgtccatacgtaaatagagccccattcccctgcttacatagagagcacttttcataaaagttaaattccaagagaatgaagaagatacaagtatcaatcaagtttctgctttgtttatctctgctctgtcttttgttctcttcatttcttttactccttcaatccttgaagccatccctcatgcaattcttcagctacatggttgaaaaaagctacatgttccttctctgcaatggcctccttcttgttttaatagccatcaactctgctccaatcaatgcctcttcactaccaaccactgaacatgctgctgtagctgttcacatagaagagaaaagtagccagttagaatccaaggaaccagacatggcagttgcagcaccaattgctggtgaggaaactgaatccccacataaagaagaaaagattttggtgagagtagaacaagacaatgttctatcagatacccaagaagaagaagaagaagaagaagaagagggaaatgcccttgtgatcattgatgaagatgagcatgacactgaagagttaaataagaaatgtgaagattttattaaaaggatgaaagcaacgttctcttccaataacttggagctaagagctgtcaacagtttttattttgataatcagaaattgctggtggctgttaattaagtagttgtgaatcttagaacatcatgtatctccctttcttttgcattgattttaactaacagggtgtcttagtttccaagtttttttgccacccagatttttgcttgtaggaattaaatcctgccctaaatggttctgtcagactatgttccatgttctgttctctgttccaatggaaacatcaagctcactctattttattaaatgcacgtcttgtttactacagtaattaactttagcatctctttcaattataaacattttaggtttacacattcaacttgtatccatataatatgattcagttaaatctaattttcatttaacccagaaataagtaacgtctaacataactccattaactcgtaaagaaggatgctgctaaaatggccatttgagttcaaaaatatgatacttcaattcgacttgttttgtttagcttcttgtgagagaattccgtccatctggcagccttataataaaattcaaccaatgtcactatagtagataaactttattatatatcatcgttactgatttgagcatcaagactattttttttaacaggtatccaccctatccatgatatctcaatcgtatcacagattaaagagtgcactttagtgagcgttaccccagtcaaaatcatcagctctatcttgaatgcgctttttataaaaataaagtgttttgtattcgctctgtgaaacatttgtttttgggctttcataagctcctgagtggaaacttgagcaatgtaaaaaataattttggatttgtggaaaagttccctttctaaaggcgggtctggaaaaagaaaacacggatagtttataaacaaaatgacttaaatatatttttaatttttaataaatacttaatttttgtgtttattttctaataaatttttattttacttttagtccctaataaattaataattttgtttttagttaatgacacttatttgtaatccattataaattaataaattttgtgtttgtttaataaatcttttttatttgttattagttgggactaaaataaaatttattaatttattaaaaaataaatacaaaatttgttaatttattaagaatgaaaacataatataagaactgaaaataaaaatattattttattaacaattcacacaaaacaaaattttattaaaaaacaaacataaaaatcaaatatttattagaaataaaaacatattttaatctaaagaaaatttgtcaaatatcttttaacctttcattatctcttgcaattcaaacacacaatcaagctaatccttattactttgtttaccttttttatattatatccagaaagaaaaataatagagtgcacagcgtattattgctgacatgttattcgggttaggatcagctacagttttgttaagaaactgtatgggatctcatcccttcatttaccaaactatctttaatatttgaaaacctcgtatatgacattagtaactgcattgggttcaaattttcaagccgcagagatctaattctcagttatgcttatttaaagtggcagattttaatgtgtgatagatagaaagaagaatgcttacaatatactcattttaatatatatatatatatatatatatatatattttatgagttaaaattgattgcaacttggcttgaaaatgtattagagaggatatttacagcatttctgtgcaaggaaataatgtatttaacaggttgtgaatgaaataaaataaaggatgtttgaaattgatacggtggcagagtcaggaagggggccacgtagcttcctttgttgaattgaaacgtacgtccttctcaagttggcacaataatttgacaacggatctccaagaaatttatatgcggcctctttatataaaaagttatttttgagagtgtttctattattaaaaatataatttttttaatagaaaaattctcaaaaatatttctaatcttatattcaaagagatccataccaaacaattctttacttgacatgagtcaagtctttatttctgagaaagccaacgaaatcatcataataaacggatacagagcgctaattttccacaaactttaagaatgtggccctacataaacatttgtccttcgttgataacaacatgcatcagtatcgttcagtctaacttagcatagccatgagcactccatcactctcaacctcaacttattctatttttaatctatgcacctttccaacacacggagtaacatccaacaactatcctcatcgcaccatttttttatattaaatataattaaaaatatatcttattaataatcatgatggttcttcatgaaaaaataaattatgtctttctctctctaataaaaccatgaactaatattaataaaattctctttaagaacttacaaaaaataagtgtaaaataaatcatttttatttatttataaatgaaaaccaattaatttatgcatcttagtttttaaataagttagatgatagagtttttaaaagaaaaaattaagtaaataagttaatttaaaatctattgtatttatctttttaccttttctcttattcataaatattgttaaagaattatctaaaactattcaaccaatatatcattaattatatattattcaagatctcaaattgaaatcttgtaaataaaaaagtgattgaaaaaggaaaccttactaacatgactaattacatcttcttctaatattacttactagcaaaatcgattaatacttcttagcaataatttggtgactccaaatatgtcatataattaattatgaataaatagaagtggatctaagttcctttagttatattttagaactttgtttgtcctaatttgtccatgttttactatataatttgacagcttaaaataatttaagatctaggatcaaaacacattgccaccttatatatccgagtctctgtcagctttagtctgtttgtataaacttttttagaaatatttataagataaaagataaaaaagaataaaatgaaatttttcttaaatttgaaaaaagaaaattcgaagatgtgtgatttgatccagatcaaacgggttatcaatttgatgacaaatcgtgtgaccacgaacccggttggttcacaccttctggaactgattttcaaaacatggctaaaaaaaccgcttagacacgtacatgtacacactttttatatatgacttttaggacttcgttaaaggttttttgttaaaccttttaatgaggacttcgttaaagttacagcaaggagacatgtataaaaatgaacacaattgaattcaggtcggaaaaacaagacaatgcgttaaagcaatgtacctaaccaaacttttttcccactaagaaaataaaaatgataaaaaggatagttgggacacttccacttgggagcgtggcaacaatgtccaatctgttttatagtttggataactgactaatttcataagttaagacatagagttcccaaaaatggcacctaatcctatatacatcttagtggcgcttcgggacatatggcttctcttctatctccatgtcccatttttcctctccaaacttattccttctctttttttttcactatttaataattaatatctcttacacttgaaaatgtcacaaccaaaatttcctcgtagccaaagtagagaagaatcataggcaatacttcccataatttttagcatcagtcaccaataatcctgacaagaacatatgccaccatcaaaatggtgaaatctatttgaatctcgtaaaattatctgtcgattaacaatatttgatatgtatttgaaagcagtgtgacagtcaccacaaacccgaaggttcttaattatcctaataggtagctcagattggcgagtgagaacaaaagcaatcgctagtttctcactatgatagctgagaagctcttctttgttttcaagctcaagatcatagagtgcatatttggtttcaggcacatatcccaggtccctcattttgttcattatctccttgagtttatcatagattttttctttttctgggtgtgtttgatctccagccacaaacacatgaactccatccttcatggtgacccaactacacccagcttccttcttaactgctgcgttcctcattgccaacctagcctctgccacatcttcccacttcccaccagcagcatgcatgttagaaagaagcacatagttcactgcgttcagcggctctaactcaataagcatcttggcagccctacgccctagctctgtatttcggctattagctcgacaacatgctcctaaaattgttctccaaataagggcattaggattcattggcattgttttgatgaactcctccagcttcttaacattacctgcccgcccaaggaggtctaccatacaagagaagtgctctattcgaggagctagttcatatacttcacccattgatttgaaatgctcaaatccttcatcaactaaccctacatgactacaggctgataggaccccgacaaaggtaacatgatctggcaattggccatgctgtttcatttgtgtaaaaagcttaagagcttttcctccatgtccatggcgtgcataaccagaaatcattgaattccaagaatatatgttcctcacaggcatcaattcaaagaatcttgatgcataatctatctttccacattttgcatacatgtcaactagtgcactaccaacaacaacttcagattctaaacaagctcttatggcacatgcatggacttccataccacgctctaatgttgcaaccgaagcacaggcactaagaacagtagcaagcgtgaaatcatccaatctttggcccctttgcatcataagccataccaaatccatggccttatgcaggatgccattgtgtatatatccagaaatcatggcattccaactgacttcatctcttcgctcagacattctagaaaagataatctcacagtcctccatctgctcacactttccatagaaagctagaagtgtattctcaatagcattgtcatcagcgacagagtgctttaagattaaagcatgaatttgacggcccagttcaagaagagaaagagaagaaactgcagataaaatatttataaatgttactctgttgggtttccatccagcttgcatcatctccaggaaatattttatagcctgtaaaactgacgcctctgaagttgctagtgcaccaataaaagaattccaagaaacttgatcgtactctggcattagaaagaaaactttctgacattcccccatacaatcagtttcagcatataatgttagaagagcatttgaaactgaaacgtccaaatcaagcccgcatttgatcccttcaccgtgtatctgttgtcctaacatgatccaacccaaacttgcacatgaactcaaagtactaataactgagaattttgatggcaccattctatttctcctcattgtgtggtaacatgcaactgcttcctcaaatcgctcattgtggtcaaggccagagattatagagttccatgaaacagtatctttactgggtatgagttggaaaattgaccgagcattatcaatggcattgcattttgcatacatattcacaagagcatttccaatcaaaatccagacatcaaccatggcattgcgaatcagataagcatgaacctcttgaccctttctcttcccttcctttaaatttgaaaattcagtaaaagcacttaaaagaactgcataagatgatgcatttatttcaactaaatctttcatttccttgaatatcttagctgcttcttcaccctggtgctgccttgccagtccaaccattaacccattcatagtcactgcattacgatcacccatctgctcaaaaatcattttagcagaatctattaaaccataccttgcaaacccgctgaccaatgcactaccaacatacaaatcttgtacaaagctagatttttcaatcctggccagcatctgctcaagcaaagtcagtccacagtcaacccgagagcatgcaacagttactaagctacagaaggtatattcattaggcctgcagttaaattctgtagcttccctttgcatgcttaaaaatagcttaaaagcagaaattgcttctcccctacgacaatagactgaaatgatagaattccaggatgcagaagttttaatttttatttcatcaaaaacacgaagggcatcatcaatggaagctgagcaatgtgaatacatggacatgagcacattagacaacaccatgtctgaagcatacggagatttggaaattaagccatgaatctccatcccgagtttaagcttatttggaccaagctcctggcatgctcgaagagcactaccaatagcatagtggtttggtgagagaccagctgaaatgacccttctgaataacatacatgcctcatcaggcatgccattttgtgcatacccagaaaccaaacaagaccaagaaacgaggttcttttggggcatttcatcaaacagcttctgtgcggaaaccagattgccaactctgacaaatatgttgataagagtattacaccagaaaacatcactggtaagcccagttttgtagatctgcagatgaagctgatgggcatctttcacgctgcaagaatctttgtatcgattatagtccaaattcaaaggtggaaattggaggtgatggtgagatgagttgtagtaatgtagcaactgctctgacaaagctaactgggtagaacaagcatgacttgcattgtgtaacaatcgcctgtagcagagtatcatgcttttcgcaactctaactaggaaatcatttaaccgtttaatcacaggatgcttgtttacatgtaagtggagtaaaaaaaacaaaatgctgccattgcaaactcaaaattttgtaactgggaggggaacaagggttatagtgataaaagaagttatggttcgaatcttctggctgacttaacatactaattgtgaaaatttatcaataaaaataaaaaatttgtaacccctccaaattagtatagttatccttatgttcattatagatagaatagtttgatcaatatttaagtttgattattgataaaaaaaaaatatttaaattttatttatttttagtcgaattttaaattaattgttaaatcgaaggattaaaaataaaatatattataaacaacaaaactcaccttttgcatattaataaatcttacctatttaaaaaattcaaaacctatttgatatttatgaatgaaaagatacttcatttgatattataattttatataaatctaacatggactaaaataaactaatagaattaaaaaaaaaatactatataaagttaattataatctataaaaaaaaaatcactatgtctgatgataaataaataaactaagtttaaaaatatgatatgagtttatttttaatgtttaatctaactttgatgataatttatttaaaaaatctattttataataaaacttctaaagctgtatagtccatatttttaatcacctttttgttgttgttggcacgatattcttaataagtttttttcttttaaattaccatattctatatctttgaattgaatgacaataatttttgcaaaagaatttatatatctaaagtatttatttattataaattataaatataaaaaataaatatttaattgtgcaatttacaatctagaatactaaataggaagaaaaggtaaattagaataaagaagtgggtgcatggacgccaggtcattagctgggtagataagggtaggatccaagccaagagaagggaacatatgtgatgacattgcatttgcagcacacaaccatcaacatggctgccgagctcactctatcttctcccttttccttcaaaacttcatttctgccaaagtcaccatcattttccccaggttcatactcccccagaactaatgttaccgttgtcaaagttcatgctaaattaggtaacatacatgcaatcactcacttccctttgcttcagttctatgtaactattatcccatccttgtgaattaaatgaggttgagatgataaacttaggaatgtggatctgatcctattaggtggtggagatgaacaagccaagcaaggaggaaagaagaaattcataaccagagaagaagaaccacaacagtaacaattcataatttttattttttccatttccttaattttctggtcaccacgtatgtttcccaaagcctttctattgaatttgcgcaggtattggcagacagcaggagaaagggaaggagagaatcccatgaagacccctcttccttacattatcatatttggtatgtcaactccttttgtaatcttggcaattgcttttgcaaatggttggattaaggtacctgttcgatgagacagcacttcgttgtctactctactcctcgatcttcacatgttaattcacgaattttaagctctttacttctcattctcaaacttcagtagagaacttgtttactttttcacatatatgtatggacattatattatggctcgttgtaatgaactagagttcagtcctaccactatgaaagtcggattgaaaaagctacttcagagtagctgtagcagtttgataacccttgtacgtttttagattgaaaacaaaaggagaagaatcaagaacaaataaggtctttttttttttaccctgttggattcgctgcttcttgtttcaagaatagcacacgttgttgatcaatgcataatagttattttaatgaccgaacaccgaactgctaagatgagatggttgactgttacatggaaaattaacaaaggaatttagtggttcgagatttttatttctttctgctccttgtttataaaacaggaaaaagaaaaggcaaagaggtttagatcgttggtatactatagaactgcagttttttcatatttaggagaaatatatggttgacatctttatcatattaggttatttgcaatattcagacgtaatgatgtatagtgcaacagttgtacttaaaaattaaatatgaccttcgacactgagcaatctgtaacttttatagagagaaattattgcgagtaaaagtaaagaaatgtaatggtctgtggaattttaaccaatatgaaaaaaaggttagcctcatttatcagaagtagaaagtggtggaaacaagtgtactcagataacagtagtgctatgcatagtatgaacatttaggtgtcgaatttagctctctcccggggaggaattgccatttaacttctatatatctgtcccttattttaaagcatttaaatgactcttaatgtatgttcaagttcaaccatcgaaattacccatgatagaacctgggcatttgccatttggcaatgggtcggtttcagaagctgatgacatcatctgagagcacaacagagaagaggggaagaaagtcatagttcattagtgttagccattatatgctagagtaaccattggatcttcatcacagcatgtgcaataagctagcatatccaatttcaaattgtgagaccttgaaatcaacttgtcaactactacgggtatgttgcttataaaaaaacactactatgaaatgtattgtatatattgactgcggactgccagaataaaataatattcccttaagttttttacattgaaagcaatttttcatttacctattccaatcaattttctacacattagattaatgaccttaacaaatgttctcataaaggcagcttaaacgaggcaagttcaatagcaaacaaaaatcttaatgcttcatcatctttccctgcgtaaggacttgtacagttccgtagtaatatatttgtgttgaaacttataagttgatcgtagtgccccaaattgatccctatcagttttgtagatgtatagatgattcagttccaaatgcgtgggcctagggacaagacgactaccacttgcggatgaagaagcctcatgtcttattgccactggtagttgtggtggtaattctggcgggggcttgctgaactcctcttcatttaagtatgtgttatcataactcgatggtggtgatggaggatcttcaaaatcggagaagtttggaactatttctgggatataatcctgtaaaaatggtttaatcaagaagctaggtgaggctatctttgtatatatagatgaattgctcgagttgaagggattgtaagttatgaccatatttttgggatgttaattcattcaatacactattatgtaaacaaaattttctagcaatggatagaagactgttgaaatcaatctaaacaaagaaaagttacaatccattactatgaacttgcaaacttattctataagtgaggtcagagtcagagtcagaattcagaactagcattagttttttatttttttgttcagccagaactaccattaggtaaattagaaaggacacatatattcctaaatcttcccgtaagcaccgagcaattaacaaacaaggttgggacagtaacgtagaaattttctatctaccatgccatatgaaattctacttctgtgccaagcatgcagctctatagtctattctagtttagtatgagaccatccactcaggcatgatgagtttcctcatcagacaacaaattttgacaaaaaatgattcaacgtgtgactaaatggatttagtaagtactgctgaataaatattgtcaaaataaagccaaactgtcaactgaattgatgatcgtgttaaaggttatagtaaaagaaaacactggtgaagatgtaatcaacatgatcatcagcatttcctgaaaaataaactaataaagtaaaccatgaaattacctgcaaatccaatatattgtagccataacctgaatcatcagaagccgatgggaactctggagcatgtgtcaagtagccatctacaatgaaacggtaatgatagatacctatcgggagtgttttaacaatgacaaaattttgatctactctcatcagaggctccctgacaggacaaggtaaaaagttcatcatatcataagatgaagtaagagcaagaactatagttggaatttaaaattgtgtagattgttacgtggtctcccagctatcccatgatcctgcaatagcaacattcgtggctgcatggttccatgtgatcctcacacttttcagcctttcatgaatcacagattctacatatccattttgtggcaggggttgcgctaccgctgctggtctttgcatttgcatggcagccacagggaccttgaaaacaggcattttaaatttgatgttttaacgtaaacgttcattgtgttgtgccgctcaagatatttactgtcaaagtagcttcattcaatggcactaactattaacttgtacattcttcatcagattaaaagcattaaatccttattgtaattgcttaaatttttatatatattacctgggagtgaactaatgttgcaataacatgcatgtattaagtctcattataaatttcttcggccaatacatctcataacaattccctataggaccagcagtgtttcccatatgaatgataaacaaaattagtattcaaaatattaaatccaccttaaaattctaaaacttgaaagattactttgatctatgccctataacctaaaatctgattttagttgtaccatcccaattccacaaatcactattaaacggtaaaagcagtctagagaaggctgagaagcatcccaatttgataggatgcttatttcttactgctttgatcaaatttctttctttcccctcatggatacactgtataaaactataacattaaacacgacctgtcctatttatttttttcaataaaagacattaacaaaggatcatctaactctgacctggggttgtatgagcaagggaggtggtggctcatatggtccagggccatgtgaaggtaactgaaccaatggatctgtgaatccattagtattgccataaagcacttcaggtggcagaaatttgatgtcttgttcgtactcatcctttttaactccagaagtgccttcaccatcctttcctctgctgttactacccatcactgaaagtggaagaaacccagattttgatcgcacagcacgaatccattagatagagaagaaagaatcagaaagcaatatggcatatccatttcagtgcataaatagaagaaacccttgaaagcaaaccaggaattgactctaggtagaagagtggcattgttgttatagaaaaaaaaaatagtttttttttgctttattttaatatttgatgagcctctcactctctttctctctctgaggatgccacttttccctgccttaaagcaactgaacaagcaagtatacagggttttattctccaatgaatttggaagattccgctgtggactaattattatgagtctggtttaaaggagaatgttcccctgctatcaggaacaaccaaacactgtctaatgaaacagtgcatactttttgcacagtttcttgtccctgtgccggtccattaaattaaattaattaaatttctgtttgtaaagcaaagcaatctaacactacagaatattggttcggtaccataatggattacaccagctaaacgaacttgttttcagcgtaatggtattgaagtcaaaagctcgtaacttgctacttgttactattattgtcaactaaactcataaaatggcatcttctaaaaaaataaagaaaaaagaaaatcataaaatagcatccattgttttgtgcttcctgtctatacaggaaaacatgagttgttggattggatttgacatgttagctttgtcttttttctattttgtttgcaacttcttgtcttgcataataaaggttaatcatttcaatactagtgcacttcttttgccaatgacaagagtactgcacatcgacaacccatcccatgaatagaaaaataaaagcctgctccgtcctcttggttgaagtttgatggttcaatttcacgatatactagaaaacaatatgacactaaatcaatagtttatgaaaatataatattaaatcaataatttctatttcaaccctattgtcaatttagtataatatacatattccttgtgaggaataaattattttttgttgcaaaggatatagagaaagggatcggtacctgtgagccaaccactgtatttcatattcatgtttgtatgttgtgattatttttatttagttacaagtaatgggtaatcagctgttttatatcatatagtacatcgtatcggataaacaatgcataaagagggctttcttgtattagaattcactaggactaggctcttgttatcgaatccaacgacggttttatctttttctaatgcgtctgctcccttgaaacgaacaagaaattgcgccatcatggctttatgttagagcactctttctgcagggatgttacaatacacttcattggaaattggccccttgaaccatttttttccgtctacaatttcatagctgtaccaaataattatattatagtcgcttcaatcctcaaatagatgtagacctattggctataacctataagggaaaaatcatgtatgtaaagtgaatgagtaaaattaattatatttatttttaagattatttaatacgtacgtcaaaatcatgatggattattaaattaaggattatttcactcttaatcgttttaagcaaaaactcactttcaaggggcattttctaatgtataataataatgaaaattaaccaagggctttcattttctacccttctcctgttctcctatagggttattaacattgatgcatcctataaagtatatatgcttagtgaaagggtgccaaacccaaataaattctccagggacaaaaagtagatacatacggatcttttccattatatagctgcttttggaatttaagatgcaaccatagcatcccaagattccaaagttcaaacaaccatgtgaaaagctaagtaaaagcatcaatagattcttgtttaggccttttgaagttatacaagtagctcctgcgtgcccttcatcaattccacccaactttagcaaggcctctatgtccaagtccccaaagtatctaccttcccatgtggtttgttttatatttccaaaaggagtcagcataataggtactagttgagcatgtcttaatccactaaagctcgtgagagcaaattatggaggaagtgggcatctccttttaagcatccaatcaatgataacaagctcaaagtaaaacagatggtagcatactttaatagtttcacagttacttgctaggtgtcaactaaacattacataataatctaacaaggatcattatcttcaaagtttacagttttttttttttttaaaacaggtggaaaggtttgtaaaatttgttacttcatagttattactatatgctagcatagatttggtagttgtttgatgcatgatggacaatcatatgttctgtggtttgattcagaccccatttccttcataaagctaatcaactagatattcctccattcccacatgttcgtcaccaaccactgaataattaattaatcgagcaacaactctacgagtgaattaatatttgaacattcattttaataaaattgggagctccgtcaaatttgtgtagtggaagttataaaaatcctttctcaatcttcgttattttcatgaaatttctcacctataaaaaatttaatataaacaaggtgtttatgtttgattgagtaaatttaggatgaaaagaaaatgaaaaaataagccaattttctatgacaagaaaaaataaaaggaaaataaatgagtctcaaaaattgaaaaaatgctcaatcaatcaatcatgttgttgctccatccagtgtaacatgcttgtaataaaatatgaaatgatatgaaaaaatcttcaccaataagtcataaatcaatcacataaataaattggacatcacatctaactcaaagttttaaaacattagatatataaattcttattacttgtacgttgttcaacatactaatcacgttaacatgacttgtattaagaaatgaacatatttgttgctcttagatattgcatcaaaccaattgtcaaagggattaatggagaattatacctatgttcatgttaaagaacacactcattgaggagttataaagtcagttaagaactcaagaaatccaataaggtgtactatgcatggcttgtcatgatcaaggaaaatcacacctatttatagaatatttcttctaatcgtcttgtaatggttcttgcccttttttagggatgacatgtattagtgaaaggaaggaggtgtttattgtgccttaatcatgtaaaggtgaaactaatttagggatgacatgtattacttgattatgtattagagttaggtccatcaaaggacatatttgtgactatgactaaacctttatctttatcattctaatttatagtttgtaaacatttattatttattattagatcaaatggttttttttaataatttcatctgaaaatctattattcttcatcaaccgttaaacttaaaagacatagatgcttgttagtcttaatccatgatactatttatttctctcaataaaatagaagaatcatattttgttatgaagtttattaattgggcttgtgacgcatactcagtaaggggggaaacgccaaaacatcattatcttgccttatggaataagcaacttaaatagttgtctgcttcttggcaaagttgtgaaaatttattttattttatattctctctttttaggttaatttattgttaaagtcttctacgggcatttgcattgtaagcaaaaatgtcaagagagtgactttgaaataaaatatgattttgtaatttacacaataagatcggtcaaataaagaagcatgatagccaaaaggccaaaataacaaatttgaactaagcaaatgataaacaagcaagttgctgcctgaatagttgtttatatatatatatatatatggcttaattattagtccttgaatttgaggtgtgtaattttttagtctttgaaatttaaaaactattttttttaatccctaaattttgaaaattacatttttttaagtcccttacataataaattgacactttataatgatttttagttgttttaaattaatttttatttttgattaatttgaatttgcatttaaaaactatcataaagtgttaaaaaaatttgtcataaagtacttaaaaattatcacaaaatatcaatttattatgtcagaactataaaaagtaatttttcaaaattcagtgattaaaaaaatatttttaaatttcaagaacaaaaaaattacacaccaaactcaaagatatataaatataaatatagtatgaataatatgagaatactcttatataatcataaaaggaatttttataaacatgtgaacaacgaatttaagattaaaaatagttagttaagatgaaagtatttataaattcaaattaaaatttaatataatcataaaatctttaaaagattttttttttaaaaatcaaacctataagtttgttataaaattcttttaataatgggtcttagttgaatgctaacacagtgattgaaaatttggaaaatttacattgtatttagggattcacatctcaactacaatacaaattaaacaagatcgtatataggttattatatatatttttaaagccaacattttttattttattataatcatgtctcagttttagcacaagaagtgccatacacgaagccaaaaatctgctcacaacagaatacctcacctctttcgaaaaggcaatacatagagacatcctcccgaaaatgaaatatgctacaaagccacaaacatctatttttcctccatttacaaaaaatataatctaaacgagactatgctccccccaacacaacaaaagatatccatcgtatttttacatctaacttttctttcattgtatttctatctcatttttatatttctttattatttttaatcatatttgtcacgtcaatcatttctctctctctctctcacttatacattccaaaaatggaatatacattaaacttttacacacacacaaatatatcaaacaaaactcttcttactatacaaaataagaactataaatacagattatcaaatcatatttcaattttaaagttttaaaaaaatatctatacgactttttaaaatgattatgtgtgatcaccaactatttttttaataatcaataattaattgtatcatatttaatttgtttttcatataaatgtattttttatttgttcttagattatttcaaaatggacataattatgaatattttgaatgaaacttgatgtttctatatttattggatgaactttaatttttatgattagctttcttatcatctatttcatgacatatcacacataaataaagttgaattttttgttgttgttagaattaatgttacttgaagatttgaactcatgattttttttactattttcccttcaatctttaaatcatttttttcaacatcaaatcaacattataactctttttaaagttgaactttttccctaacttcgataataccataggcataaaacattattatgtaattaactttagaagtatggtcacgaattatcatcttcttagcaaggaatgttaaggtttgaattttgatccattttgtagaaacatgcacgattcgtttatcaccatacgtcacttaattggtaactttgaattttctcaatccttcgaatgccagctttcatactacaaataaaaaggatattgacgcataagctttggattcaaagcaaggatgttctataagctccgtggttagaataaaacaggtaataaacattataatatggtatgttaaacatttttcaaatgaaattcatgattagtggcaaaacatcccctatttccatccctcttcatgacaatagagtagtcgaattttctttcttgtgtttctttttcaagaataaagttatattctcaaatcccaaaaataaagtatttataaaattgtgtcacacgtggtcttatttctataaataaaggatcaatggtaaatgatttttttattataaaggacaatgactacatcaatcatatttgtataaatgagagattaacaagaaaatttgtttttaagggatcgaaagtatatttaatttattttacttgcaaagattaaaaacatttaattttttttatagtaacatatttaactttaattaattaattagagagtttaagagtgagaattttgataatgtgttataaaacattcacttttttacgcaaatgactatatgtacaaatggtttgcaaggggcatcattaagttgttgctttataacccaaatagcttgaacttgagtagccagcccattgaagcctggacccggtttatgattctccttctttaatattaactgggcctagtaaatcatggatctagagtaccaaaatagcaccttttaaatatgtgcttgtttggacccaaaacataaaaaaccgtaccttgcccttgctcctccatatctatgctgtgacaaatattcatatgtcctcatctcgaattctcacacagaacttcgaaccttgccctaaatagaaacgtacttgaattccacattatattttctggtatcagcatactaactagaggggaatggaggtacatctagttgtcatcttataaacataactgattcatttttttcccctttgggtccataattacctgattttagacaacttattgcatcaattcataaacctatgctagtgggatacctattatatatcaaaccaactttgctttaacttgcttcattgtagaagctagatctagcatacaagtttcttatgtattttgtagctggcttgttccgttcaaactttcttaaatcttgagcatcaccttatctcttttggctgacattgttgcagttaattttaactttgtttacttatcctaaaaccaaaaacaaagaaacgaatcaaatgtccttgggtagcttttataactttcttttgagtaagacactgtttactccgttcttaattgagcaacaaccttactgttaaatattgaaacagtacaactattggttgccccacaatgatgctatttgatgctttttattccaaatttggtggctcggcctttaattattgcaaggatgagggtgacaactatgtatcaaccaatgtaaaacataaatttatttgtcacgaacaatgatggagcccttttcactaggaaaaataaaatgcttgaactggtttattggaatattgagccaaattgtcccaactggcaaaagattttggtctttataaatgattttgccaccaataataatttcaacgtgttctccagaggactgccgtcattaatattacgcaaaacacaatttaaaacatagatatacattagataggggctcctgcacacttgcacatattatacatttttcccaattatctggctcgcattacagtaccctatctaaggatgatgattaaatttaatacacatctataaaaattgtctataatggataatatttttacctattcatgtaggttttaatctagatatgataaattttttttgctgactttattcacagaatttttgtagataagtaagtgtatgagtacaataatacttttttttaatagtacattaatactataataactgaatcacttcatgtatatactcatattttttttaatcatataattagtgcgaagtatgcaagtatatatacatatatattataattaggatttaaaatattttatatatttttaattaagttagatgttatactatttattattatttttgttttattaattacatataatttttctaaaaaagtcatataatttttaatatttattttatttatttgtcaaaaaataaatattttttttattgagaatgaacaccgacactaaaattattacctttacaaatataaactaaagtacggatttttatttttaaaaatacaagtgtaaatcactcgtcttgaatccttctcggttattgttcaaaatgtatgtattatacgagatattttaaaatgaaatgaccttttgagagaatttaagtcaaaattcttactaaaaaatacatttcactcagcagctagccgaaaatcaaatgttatattaaattaaaatttatgatcatactatattataaaataaccacgttgaaggatcaaaagaaaactattatgttttttttactaaaaaaagttgtttttgctgcttatctttgaacaactttattaaagtcccacgtaatgaatcataaattaatgctaaatgaacataaaatttattcgttaaactaaaactacaaataatctcttaattaaacaaaataacataaaatttattatattatgaacaattaaaacactatttcatgaaatatattttctttttatttgatattttttagttttttaatctgaaagtatgtaataaatattttttttcataaaaaataattaattaataacattataattttatttcatttcactttatgctatattttattctatttatttccacattttattaaaaacatatgcaaacatgattgtagatttgctagtgcgatgataaaatttgattttgcccattttggatttacgtaaattaatagtatttggtgttttttttattgagaaaaatttcaacgtcaagaatgctttcagcaaattaaatctcaaaggtacaggacagtgtgatatttgtcgtcatcgttaacaaacgttttgtaacattttttttaatacgcttttctatcatcaaataaaaattataaaattttatagatttcgcttcttactcaatattttaaatttattaaatactccttaatatgtatatgttaaccttgaacactaacacttttagatcgaaaatagtaccagagagcgagcatccaaattccaaactcctcttataattttaagtttaattttttttcttgcaattcagttttttagtttttttttccttataactttttttaaagaataaaaaataaaataaacataatttataagaactaaaaattaaaaaaataatttataaaaataaaaaattctaaattatcaaaattaaaaatatatttaaattataattttatttaatacaaacaaatattggcaactgtacttaaaagaggaaataaaaatcgtgaaactgacatgtacattagtggggagtggggcctaagagcgtcggtgggatgcggatgcccaattgctcaattagcccactttgccctttaatactatctcatctcatattccagaaagagtatataatactatctcatacactgttttatacaatactttttacttacttatttattatatctcatattcctctttcttaattatataatttacaatttcatatttctctcttaattgtataatttatcacaagagtactatttttcttcaaaagaattactatttttataccactcttcaaaaagttattaaatactactaattcaaaactttatgtatccatgattctttctaatcttcacatttcattttgtcggaagtattagttgatttggttgatgattaacttttatccaagaaatttgaacaactaattttaatgaaaatgttttctctcaattacatcaaaaaaatgtatttatagattgtttattaacaaaaaattctcatattgatatatggatatgattcttaccgaatgaactaactttgttggttctaattattaattttcttctaaattaaaaactcaaacacgtattataatataaatattataaaaaagtggggccaattaaattagttatcttaatagaattgtcaaaataatggaggatggggtccatctcgaagccaatcccaagctggcattaatagtatgccttctcctcataaacggacatgctgctttagttataaacccacacactcctctcttctccattctccactctccctctctctttctttccctaatcctccaaacaaaatgaagaacctcttctctctcttcctcttcctcttcttagcctcctccgccgtcgccaccgtccccgcccacaacatcacgcacatgctggccaaacaccccggcttctccaccttcaaccactacctctccctcacccacctggccgaagagatcaaccgccgccagaccatcaccgtcctggccctcgacaatgccgccatgtcctccctcctcgacaagcacctctccctccccaccatcaaaaacgtcctctctctccacatcctcgtcgactacttcggcgccaaaaagctccaccagatcaacaacagcaccaccctcgtctcctccatgttccaggctaccggctccgcctccggcaccgccggctacgtcaacatcaccaacctcaaggccggcaaggtcggcttcgccgccgaagacaacgacggctccctccactccttctacgtcaaatccgtccaggaaatgccctactacatctccgtcctccaaatcagcgcccccattagctccgccgacgccgaggcccccaccgccgccccctcggacatcgacctgatctccattatgtccaaacaaggctgcaaggccttcgcggaccttctaagaggctccaaagcccttccatctttcaaggaaaacgttgacggcggcttaacggttttctgccccaccgacagcgccgtcagcggtttcgcgccaaagtacaagaacctcaccgaagcacagaaggtttcacttctgttataccacgcgactcccgtttacgagtccctgcagatgctcaagtccagcaacggcatcatgaacactctggccaccgagggagcgaacaagtacgacttcacggtgcagagtgaaggagaagacgtgaacctgaagaccaaagtcaacacggccagcatagtggggacattgatagatcaagatcccttcgtggcttataagataaacagggtcttgatgcccagagagctattcaagcccagcgatgccaaagaccaagaccaagcacctgccgagtcgcctaagcctgccaagaagaagaagaacgctaagaagggggccgccgattccgatgcggcggatgcaccggcggacggaccatcggatgattcccaagatcagaaggctgccgatgaagacagcaatggagtaagcggattgcacgtgagattcctcatggtcttcttcggtttaattatgggctttttggctctatgaaacacccatacatatggattatggagtgtcggtactatacacttgtggtcaaccatcattgcaattaagattcttttctttctttaatatatgtgaaggaaataaaacgctgccaccgacacatgtaggaggccatgtgtacttctttctttcttttttttttaatctgttagtattataggttttgtatttattgtttgtttgttttccgaattatttaattggcctttttttccagtgtgggtagatccggtttgtgctacctgccagctatgggatgtgtgcatataaacagttttcaattcattagattttgatatcaatattcgcccctcatgttttctttattattgttattatgctacttgtcttaatttccgcggtcacccaattagtagttcataataatctatgtttttcggacaccattaatatattttaattttctaagacattaagctcggattttgtactgtaatacgacattggcttaaggtttgaacttgctactgcttatgagttacttaaatcatcttcaatcggatttttcaagtgaataagatatgtatctcaaaaataatatattttctctattataacaagtccatgtgataatgaaaatagatatgtattttttataagaaattattttttaataataaaaaataatatttatctgacccataataatgttataattaaaccataattaaataaaatataaaaatatgaattttttaaaattttctagaatttctcatcattaaagaaaaattatttataactttttttataatgatatgacactttgaaaataaaaaaaaaaataatataaaaattataaaaaataacttaaaaaattctcattaaatatcctcttatcatcttatcactatttcagttctagtagcaacttgaattaagagaagcttatatagcgaggtaaccttttttttgctgtaatttaattaaatttcttacagtttcctttttatttaaatgtttaacggcattttcctctaactgaatgatagaattttaaaaatatggcccacccatcgatcaaacttgtaccttatactgattatgcagtggcagagcattttaatcccaaggagatattgttttccaaaagtgataaaagaaattgaaaaatcaaggtttaaaaattttagtcgcaatatcataattttggaggctttctaaacagcaattattgcggtagctgctcaagttgtcctcaattttttattttttagttttgataatcataacgtaatttcaaatccgataccgatagcatccacaatttaaaactgaaatgaaaataaaaaatcagaaattatcagagtcctgaaccaaaccagtacatgatgtatggtcctgatcaaatcactatatgagactaatcagtattattaatcaagctaaatattggacacttaggccaagcccatttcatatttatatcaaattggttttgatccactaatgttaagatttaaagcttcttctacagagaatttgacaaaatagaactgagtttcgaaaagttgacaaaaaaaatatttatgcgtgttaggggggtgagaaggatgaaggatctcccattaactttgcagctgagtgtcatatttcttgacattaagtgagtcattaaagtaattgcatagacaaagattatacaaatttgcaaagaacagaacataatcagcggtgaatcggtgatggctaaagattggaagaaactttgtactagtgtgtattttagagaaactcggttagtgctagtgcgacgtcttccttcccagtatccatgtattgaattgaatgtaacctttggctcgagtcctaatcggttctgtataggagatctgtagctgctttattagctactttattacattccacaacggatagtgtaaaccgatatccgttatatgcagatacaaatttacttcagcaccatcactagtcttttcacctgtcttcattttttaacattcatggatatctatgggtattcgctggtatacaaaaatccacaggtagttgaattcgaggatatgcgtgaattcacgggacgggtacggacagattttctaactcgcggagcatgtaacacgtgcccctatctagtggtcaattcacaacaaccaaagtatttgacttgttcattacataatttttgcggtgaacaaagggagcaaagttcaatgtgctgcagagggtgaatacatcctcgttgccaagaattcttttcaccctcaagattacaattttctataagcaaaaccaggatggagctgtatagccggaaatattgcagatatgagaaagaaaacgttgccaagaattgcgaatgggaactttgaactatagtttcacttatatagtatttataaaagagaccatcactgcaatgtgcctacaattttcaagtctcggaaccgaaccattttaaagtaactcagtctggtgtctgcagctgccaaatcagcgctataaacacgggatcaagatcccctgcagttttttcttttccaactgcatgaatctcaattctcaatcattaatatatatttctacttgaataaaattttgatagaaaaacataattaaaaaagaatggattgtgaaagattgaactgcaccactgcacggatgttactgcatgacctacagttacttattaaatgctgagaatcctagtccatctcttctgaacctgagactttcggatgaaaccgtacaaaacaccagaaaaaaaatcctcgtactaacagaagtgcatgttctttttagcatcttattctactagcctacacttattttccacctcaaaaatttctgatccaagattaggggtcccagatttcaaaaacaactttcttatatgacatcatccccattaaaaaaatgccgtatatgttcaacttaatattttggctttagctctcggctctaagaagtgaattagaaaatcggcagtcctctacacaataatagatgacattataaaattaacaaacagtagaatggcaccatattttatccttattgaagacataaaattcaggttccggatgcacctggaaaaagtactaacaaataaagttacgtatacagcttgaagtaagtactattaacaaataaagtttgagtatgatatataaatacctctatatatcaaacattttattaacatctattatttcagtctatttttctctttttatcacaaagtattatatatactttatctgtcttttctctctttatctatctaggatctaggtgtctactagagtttgctgtccacaaatgttgttccacaaagtttacaagtatatgtaacggcaacttgcaagcatatacatgtcaatcttgctcctgtttggaagctaacaaaaggctggcatcccggttgttaaaatacagatgggtctttttgccagaagatgtacaagtaagcacgttagaaaaaccggtgtagttgccatccagctttgaaatgcatatttttctaataaagtcaaaaagctcattttcttgcacaaaaggctgggcagcataatcttcaactggcatccactgaatgaaaaaaacgagacaccagttaaataattacagaaattacaaagtttcctggtaccaatgtcttgatagattatcagcatgtagccttcattgacttggagagatttaaaatgaagtatgaacttaagcaacattttagggtgcgtttggtttgttatttattttcattttaggagtaattaataattaacagagtgaaaggtgaaaataatatggtatttctttagttatacttaaagacatgtcaactgaaaattagtgagattctcaattgacattagaatatataccttcgctgcctcaatttctgaagcctgattctgaatgtcaaacgattgaggttgcaacatgcaaacaaagaacaaatctgatttctcgaagaacgacttatggctttgcctagtacaaaagaaataaaggtcggtgaacgtgaaggccacattcaatattaattcagatttcagagagaaaaatagtgtaaattatatgcatagcagtatgttggttatttgtggaaaaaaacgcattcacaccacatattacctgaatgctaaaacttcaacaaactttgtttctatctgaaaaaagaatgaaagtaatggcattagactttgaaacaatccaaaaaacatgtaatatataagctatagataaaattacaaccaagtttgtcaaaacagcaaacccaaaacttggtcgatattagttgaataatttgaattaaaatttactaagtaatattatttaattttaaatatttatattgtcacatgcataaaaatatagtgtaattatgaaatttcaagatttcagaggagtttaaggtttgtaaggaataaattctgagaaaaattaagaaaatccatttttttttttttgacaaaacagagaagcataggcctttatttttggggtcaaattggaatcagtctttgattataagcaaaagagcaagggaacataataaaaaaaaggaagggtcttaatcgtatattagatatttactaaagcatgataattgataaaatattaaatacacatgaatgccagtttttatgatattcattaaattattttatttttacatttaaaaattaagtttgtaaggaaaataataaaattttaaaaaatgttgtatataaatcttactgatattgttttttttttcttaaaaaaatacataacagtgttagctaaataattagtgacagagaaaaatataaagtggattgtaaattatagttgagttcggggtttgctattattttgacaaatttcaagtggaatgtaatttactctaaactataaattatgtgtttgcttgcttacccccgtctcttctttgacttctctaattgcagcttcacagagatcttcaccctgcaagtggatttgaaacatatcaaaagataattttagaagtttaataatttggtcggtaataattttgacatactttctgtccaaaaataataataataattttgacatacttcattaacagctcctgttggcatcttccatacacctgtgcctctgaatttgccacctgtttcctgaaccacaagcacctgtcaaatgaaacaagatcatttcaaaggtttcctcctttattcaggcttcaaagcttggacttcaaattgaaaaagaaataaagaaaagattacctctttgttattgttgatgacaaaagcaccaacaccgacacgatgtgaagcatttgcaggaatggtatgaggagtatctggaatccaacggaccagcatcaagtaatctggctcagcatggtggtacctaaatccagcctgaaaaaggagcacaaaatttgtagcaaaatggcttcttaattaagagttaggcttaggcaaataaatgataataaaatgtatgtttaccttgactgcaggatcaacaagatttgaatgttgtatgggcaacttgatccagacccccttcttgccctgttggctccacttgtagattgaagcttgcaatatagaagagaagagcgtagaatccatagggtcttggacgtctacaacgactcctccatgatgatcctcaactccactgagcaattcaatcttttcaccttccatttggttgtgtagctcttctcttgtaatatatatatatatatatatatttgcagacaatgaggggatgagatgagatgataggaacaaacaacgtatatataattaattttggagaatggatggaaggaaggaaggtatgtaaactgaaaatcaaaggtagtgatgaggaaatttcattttggtggttttcttttcttgaccctttactttcccattcaacatttctaatacggagacaggtgaatcaccgtcccatttttccatgagcacggcggtgtcattgacctgttgcggctcaaagtacagccaagccgtcgaggaagtcatcaattattcaattacttccataattgtttttttctacggactctaaattaaataataataaagatttaagaatgaccttttcttctacaatgtttttctcctttaattcttcttaatttctctgttcttgtgtgcttgtttttctaaaagttaaattactttctaagttcctaaattatttagcaatttaaaattaagttcttgaattattttcttaattaggagatgaaaaattaataatatgaacttaattaaaaaaagtcaaaaatctagtttagttaattaagtagaatgtataagttattataaaccttttaatatgtattcaattctcacatattaaaactcaaagatgttttgttttttttttttatatatagatcttcaaatatacttagctgataatatttggaagcataatttaatcaattctaaaaatcttttaagagaaaatatataaacatataatattaaaatgaattatgtatttaaatttgaggggttttacaataaaggatttccctatagttaaccattaaattaaaaagaagtaaattacattaattatttttgagattttatgaaattatacaattttttatatgtttttaacatttataataatctcaattttcttatgtataggaacaagatgtaatattttttaaataattaaaagaatctaagtaacgtataaggggacgtcaacgtaaacttttaaaaataattaaggggttagtataaggattaaaaaataagaggatctgtgtaactttacaaaatcttaggcgtgttgcgtgtaatgtaatttattcattgaagaatcaaaggttaaacttgtgatattataaataagtgtatttgtgaagttatgaaaatactaacagttcattttaatataattagtagatgctatagataattatgaaaaacccttatataatagaaagagaaaaaaaatactaacaagtattttaatagtaattaaggagttaaagttagaaaaaattacaaaaaaatacattatttaatgttagcagcaatttattttcataataattttcaaaacaatgtctttctgtttattagtttcaattgaatacttggtagcaagactttaaaaaagttaaaagcgattagacaaaaaattcaattaaaaataaatataattttaaggatccaattgaaaaaaaaaaattagaacctaattaaaaattgttaaatagttaaagagcctatagaataattgaacgtaattaaaattcatacggcctattaaacaaagtgagttattctctatttaatttaatgaatcttaaacctcaatttaattaaaaattacttaacttataactaataataaagttaaaagtaatatataaaaatgtaatgctggattcctcttgataaaacttagtttttgtatccaatagaataatattttgctattaaacaaaaattgtaaattgtaaacttacgtgtttttgtgttgctcgtgctgctttgcagtatttcaaacagcccaaatggcatgtttgtaacatcaatagctaaactaaggttaaatgaacaagaaaacttgaaaagtaaacagcattgaaaattgacatcaacataaaagcatgatctctgaaacgctaattattttagccagaaatccatcattatcatcttttccagctttttatagtatattattctattttcgtttaaagttgtaccttgatggcagcgcctagagcatccaacaaatttccatctgaactaacaacaagcccatcaatgtaaggatcccaacaaatttttccttcaacgagaataagcgaggagaggtcaattccagcacctgaggggaaaaaaacaagagctcaacagctatattaaaaagaggcaacaacatggaagggaaagcatatggtagtaagcataatcttcactctaggagaaaatagacctgctccacttttaaaactatttaaagcaaaaagtaaaaaaaataatgtctgccagggtttaataatcagaataccctgccaaatgtcaactgattaaagcctagcccggggaataacttcagtttcaacagagattagttgatatgtcaatctctttctaccatcacaacgaagatcttgaggaatgaaatgtttttctcaaagagataaacccaccattcctgcaaaagtaagatttttttctctgagaaatttcataactaaaaagtacaaagcggaacagtcaagtaaagtgttgttaaaccaggatagcagtgtaccaccctgttacagtctaagtagtaagtatatactttctgattatccatgttatgcttgcaggagggtcttagtaataaagttaaatcctttctcaattgaaaattcttattacttatgtacaccttagtagcatgcatcccttcatttggaaccatatactctaataaagtgatttcccaacctgcctatgagttaccacacaacagaaagtcattaacttgaaaataaggaaaccaatcctaactcaggtatctcaaatgcttgtcatcattatctatttcttccactgatttctcgaacacagtcactttctatatacaggagattaaaaaaataaacttaaagtcaagtgttctagcagctactttttacacaaagaattaggattattagacaaaacacaaataattggtctcagaacttaaattaaaaaggcaggccccatatctggagcactagcatgccatatcacaagcactcataatagagaagagagaatttacaattacaggacctgatttttcttctaaacttcaatttgaaatcaaaatacctgaaaccaatcatgataatatttacaaagcatttgaagacctaaatggcattcctaagtctaaacacaataaggagttggcgaaactacatcagataaaaaaggaacaaagagaaaactcctagaaaagaataattactaataacagcaagcattcacaatcacaggcgtataaagaaaggcataaaaataaaagaaccatttagctagcatattaatggcatagatagaagatggaaatctgaaattgttatgaacctgaattggtgaaattagaaagtgaatgatagttagattactagtttcataaaattggattatgagtttgactagaaaatattcttagaatttgaacggaatgaatttactctttccagtgactttgaattttgaagcacacaatgcatgagaggagaggtttgaagctgataatgggctccacaaacctaaagacatagcagcgtgtttcaggtttcggagtctgacagggaaatccaaaaaaaaaaaaaaaaatactcgttctgtcaaaaatactcgtttattaaaaatcatctattttaattttagtgggttacacttatcattgattctttctcatagattctttcttttgatttagacatgagatctaccaaaattaataattttaaaaaatattagtcgatcacaaagagtatgtcatagataatatttttaactttcttcttttaattttgttgtggtgttgtttgaaattgaatgaatggaaattgttctctattaatttagctatcaatttccgcggttgagcttgagccttcggtgatgttagttaaagttagctttaaatgattatatgaatataaattattagaaattgagtgagggatatggtgagtgtaatctgcaagggaaaattttctttttttccccagttgctgaaagtaaggaccgaggtagtaggagatatttgcttcgtaatgttctgttggaatgcatcaatacgtgagtgactacattgcttggtaaatggtaattgagaaatcgtgatgccgatagtgcattggatttggagtggaagctttgaataaggaatgcgttcgtggggccatgtctttgaaataaattgctgataatatagatttcttatttataagatataattctaaaaggaaaaaaaatcaaggtaaacatatttttatcatacacgttttaagtattgatttttagacttttataagtattttatttatttatttaagtgatattgaaagcttaaaagaaattgtatctatcattgttgaaaatgacttttttttttttaaaaagtaatgcttgtgttctataatatataaatatatttatgttctgttgtataaatatatttatacaaaaatacttttacatttatgataataatttaacaaaatatacaaactttcatgttgttgatataaaaaagaagaaagtggaaagaaaaagatttcacaaaaatgaagctttgtaccgtgggaaaataataaataattattctaggagtgagacacataaaagattcatatgatatcattttaatatttaaaagactaatttgatagtaattttgaatttgaaaagaataatagcgtggcatagttaggttaacagttagaagaataaattgaaggtttgtcatttatgacatttgtggcttagacataaattgaaggcaattagtgattaatggcaaacggtgaaaaactacaagagatagaagagccttacacgcaccgtgttgtggcctctttccgttttttgtcgttaacaccgaaactgaagcaaaagtcagttacttgcactgtttcatttaaaacttacaagcaacaacatccttgtacctctttcattcttactatgcctttggccgcgtatgtataatataacaacattttttccttctggttgttggtactaggcaaatgataaaaaaatctcagtgtaagtatgctagtaattggaaaggtttgctgaatctgtattcgctcaagtaaagaggcaacaggtacaataattttgattccatgctaaatctgttcaattttcatgcaagttgctcaactaattaatttgttcaagaccaaatgaatattcgttgttgtaaattactatattgagtttatacaatattgttgttgtctctcgtgtttaatacgactactaattgcttctggtcatttcatattcattcaatgaaatagctgatatcaaacactaagtatggttggcagtatcttttgtttgattttactttttttatgcctgatataatatgtgacaagttctctgtaatagaatccatcatttttttgcttgattggttaatttgtcatgatgcatattccccattagcaacatttttctttcttcgaaaccgtcaaaatcatgcttcaccaagttcaactgtagtatatgatgaggctaccatcttgctgctggttccattttaggtatcagagttttggatgacccgctttctttttcttctccctctgttttctttttaaacactttataatctaattggtttcaccttaacataatgtgctgaatctgcatgtgggctaattccaaacatctcgtacttcaagttctattccttctgtgcaaaaacaaaattggtggggggaattgtatttttttaattaaaactacctttgtcgactagtcacgaggtaaaatcaagtcaaaataaaaaaaatatacgcgttttagatgagcactataattcaagcttctgaaatttctaactgtagcacaagtaatttaggagatataaggttaatctagtggttggggaaggatgaagggagaagagagggaggagagatcgcgggtataaatctctcaattaacatttctaacaaaactaacaaattaacattcgccgataaaaaaatatcaagtacacaaatatctgatcttgttggtgttcggcatgtgctatctctttttcttaccgtttatccttgtgtttctttttaaggtgacttcatctcatcttagacaacagaaacaatggcaatgcagggttgttattgtcactatacgaagttggcaactcaaagaagaacactggacaatctcagtttttcaggctcaatttcggttaacaaattgtcaaagaatgaaaggaccagaacatgtgatccattatcatcagggaacaatcaattttataggttaccggtgaaaatgcgacagacagaaatgcctgcctcaaagtatggaacaaatggtaaagctgttagaatggtagggacaaatgagttagtgaaaagaaagagaatgttagagaataaggtggtgaatggttcagcaacttcaaaggaagtgagaaaaaatggtatcccaggcttgaccaagacagtgaaatctagaaggtcattggaagagctaaaggttttagccacagatgaaggtttcagttgggccaatgaaaattacagttcctggcagaggtctattgatgtttggtcttttgtggcttctttacgtattcggattctgttggacaatgcaaaatggacatatttcggaggtttcacagaggcaaagcaggtaggttctcaaggttcggttcttttcttgctaaatttaaaatactagtattttccatttatttaaattggccatgtttctttttgctgacctgaatttttttaatatttttatttagaaaagcagaaggcggaaaactgcctcatggttaaggaagtgtatattgcagcttggtccaactttcattaaacttggtcagttatcatcaacaaggtcagatctatttccacgtcaatttgtggatgagctcgcaaaattgcaggtatctctgtagattttgtttttctcattttcagactcatcattgtagatttgtagagattcccccttttttttgttttttttttttttaaagaagacgaagaaaggtgcttaattttgtcatctattctacttatctcattcaaaaaaaattctcttagactatcctttattaaaattcgatataagaaattattgaaaataaaattttaattaaataaaacttattctgaaaataacttcgttaaataaaatgaattaagatttgcttgtatttttaatcaatatacatgagggtttttttccctatattcaagaccagaaagtaattcttatttcttaatataacattatacaggacatggttcctgccttctctcctaagaaagcaagaaaattcatcgagagtgaattgggagctcccattaacatattatttgaggagtttgaagatcggccaattgctgctgctagtctcggtcaggtgtttgaatctagcccagctcattccattatatttattattttggttaaattaaaaaggataaagtatctttctgtttattacattttcataaaattattaatattaatttgattcctgtaaaaataaatgacatattttattagttctcaatgataattccattagatatgatgtaggtaacaaacttacacatgtaatttgattataaataaattaaataatttgtaatcattaaattccaaaataaattaaacaaattatggcaactaaacatcccaaaaaattataatttttgtcatttcttaaacaattttctcatactatccaatgagattagggaaaagatgaaataacaccaaattctggtatttttaagtgtgtttgaaaagatagagagagaaaaaataatgaattaggcatatagaaaattgtctaaggggttaggggtctaataaagttaccacggaagacaaataaatatatgttttattttttcacgggccaaattaattcaaaaaaaattatgagaaaaaaattaatacttatcaaattttacatgatccaaagatattttacctaattaaaaatttggtcttatacttggatactttccattttcatccttaccttaaaaaaactcacattttaacccctgcgtgcaagcgtttaccaattacttcacagacattattatgcatgggtcaaaatgtaaactgactttatgtagggagaaaaaaggatcaatataatttgaccttatattttcttacattgaatcttttcctattgttaaaaacttgtagctttattcgaattggtcaaatttgataaatgtaacatgaagtgagaggcagcatgtggcttagtccattattagaacaaactagaacgtttctcccatcttgtagaccatgataatagcttattaatgttgttcttagtatagtaacatcaattttggaggagcctgtctgtaggttcatcgtgctattctgcataatggggaaaaagtagtcatcaaagttcaaaggcctggtctgaagaagcttttcgacattgatttgagtaagttgtggttactttgtttgttccattgacaaaacctagggattttgattaagaggatgttgccaacagccaattatcaatgaatccaaaagcctagactgttaggtacaaatttgccctttggtaccaaaacttatttatgtataacagcatagagtttaaggattactattttagtgaattcttttgtttagggtttaaggattactattttattgtttgtttgtaactattacaagtttgcttgtttgttatgtccagaaaacttaaagttgattgcagagtattttcagagaagtgaagcttttggtggtccacttagagattggattggaatatatgaagaatgtaaaacgtaagtaataagcattgaagtgcattgttatcgatatttcatgaagtaaagcatatgctaaattatgctcattgctttttcaccttttcttcattactttattttccaatgccttaatttttattgtgttgctcatgctattttgcagtattttgtatcaagaaattgattatataaatgaaggaaaaaatgctgacaggttccgccgagattttagaaacataaagtgggttcggatacctgtatgtttccttaggcaacacaaacatccgattataaattgtataaatttttaatgtctagtaaaaatattgaattttgaccacatcttcatttctttcgttgtagctggtatattgggattatactgctttaaaggtgttgaccatggagtatgtaccaggttttcatcttaactaatgaatgtgccttgtttctccttttaattatctatgacactatggtattatgagagataatatattgtatttatgggagctaataattctttctttaaagttatatattttatatgacattatgctagagaacgtatttttttaactgctcctatctctgattttattccttggacaggcatcaaaatagaccaggtggatacattaacttcgcgtggttatgatcgattgcgtatctcatcacgtgctactgaggcatacctaattcaggtggaccaccttggttctctgctaattacgatctaacagtaatatctgatgttgaatatggttttcattttggttactcagaataagtaaaatgtctcaacctatattaaaaccaaaaacgaagaggaatgaattgtcacttgaagataggtgttggtatcactcttgtagccaaaaaggttgagttaataaattatcattactttttgtcttacagatattgaaaacgggtttcttccatgccgatcctcatcctggaaatcttgctattgatgtggacgaagcaattatttattatgactttggcatgatgggagagatcaaatcttttacccgggagagactgcttgaacttttctatgctatgtatgaaaaggatgccaaaaaggtctggatttgtactacttttggattatttaaattcataacattgtcttttactaataagaaatcaatatctgatatcatgatacgctattttgttaagtgtttaatcaacatacattttttaatttcatgataactttttagtttgccacaattaactcaaacaagcacgatgacataaaatggcttttgcttcaagtacgattactattgtaaatttcaatccagctaaccagttattatcgtcagcaaaaaagaatttgacgttgctcataacttgaattgatcaacttcagtgtccctctttcacactattttaaacatacaaccatacaataaacaacggtgcaggttatacaacgccttatagagctcggagccctccaacctactggggacttgtcatcagtaagaatgtcaactacttgcttttcaaatattttgatttgtgtcttgacacttgattgacctcataaatgataaatttattttccaggtgaggagatctgtgcagtttttcctggaccatttgctaagccaggcaccagatcaggagcagaccctttctgcaattggggaggtttgttaacattgttacattggatcaatgaattcatagctgcttttcaattttttcataatattttgggtgtttgtttcaatggaactaaaggataagctgaaggtggagaattattgttttctattggttattccaaactatctggagaatctagtccagactttattattgactattgagggctttctgtggcaggatttatttgcaatagcacaagaccaaccattccgttttccatccacctttgcctttgttctcagggcgttttcaacacttgaaggtttgcatcttctcaattctcttactgtccctctctatctttctctctttagtggtcattcttgcaaaaaaaaaaaaaaaaaattaaacatgccctaatgtttactattaatttcacattagtatatgcattataagatggtaaccaccccttcctttcttgggaaaaatttaactgatttaagacacagttaggtaaacaaccaaattaactactcatccgataaattcttatgaacttatttataagcttaaatgtgaagttgatcaaaatatgtatcactttgaaatttattgaaataagttaaaaagagcaaaaggatatatatgttagttctttgtatgacttcatcatctatttgtatttctttttttctgacaggcataggttacacactcaatccaaatttctcctttgctaagattgctgcaccctactcacaggttcaaagttcagattgtccatgaacaaatattgttcccatactgcattaaaatgcatgctcatacacatacactttaccacgttacaggagcttttagagataaagcaaaagcagcgcactgcaccccagcttgtggaggagataagaaagcaagcagatgatgtaccacaccttttacctttgttctggataatgtttccttaaattagaaaaatctcatttgatgtgaagcatttatctatagcatgtgcaactaatgtgcatccacttgaattgatatttgataacgcttgctcgtgtaatacctttaggctacaacctataccatgtcaatgccatacagagttcaaagaatagaagagtttacaaagcaacttgaggcaggggatctaaaacttcgggtccgagtgcttgaggtcagtttttttttttttttttctttctttattcttatagttgaccccattttttattttaattcttaacaaaaaaattgtaaattttagtctctctacaattttttgtagtagtttattatcgccaaaaagtttctataacagttgtatatcgtcccaaaaacttctctagactctagtgttttcaatagaaatttaactttttatgattaaaacttacaatttgtttcgtataaggactataactcaaaatgaagttcattataaagaccaagtgaatagttgaatctttatttttcttcacatggtgtatgctatgcctatgtgtgaccaagtatttctaagcattttcctaatgggaacaactttctaattaggaggtcgttattctggaacttttgttttgtaaatttgaaattatttaacttgatttgctagtctgaaagagctgctcggaaagcaacggctttacaaatggcaactatgtataccgtattaggaggaactctgctaaatcttggtatcattatgagcagccaaggcaacataactattgcgaatggatctttcattggtgcaggtgactatatattataaagctttttctcaagttattgtccaatcatgttccaatttattcttaaggctgatagatatagcatttcaatgtgcaggtatttttatgactctatttgtcagatccatgcaaagggtaaaaatgcttgataagtttgagaaaatgatataaatggttaccaacaaattcgattctttcaaacttacgtaaagttatcctcatcttcattttattacttgtaatttgtaaatgttcaattttttaaattacacaggcatagcaaattccacgaattttacagaaacatgattgaatgatgacactacaaggcattttatgacttcaagacaaagaaaaaatcatagttttctaagtgagaaagcaaactgttggcccgtgagcctttccttattcaatggctaattttagacagagaacaccccgtgattaagatcatagagtggtaaagcttgtcttggaccgtaatatatctacgactaaacgaactctatctctcgtagcttgcaattaaataggttaaccccattggcggagccagtaaaaaaatttagctcatgccaaattttaagtagtgtcaaattttatttttaaccctaaataattatataagtatatataattattaaaaaaaaattcttcaccactcaattattacaaattttattttttaggtaatgtcgtgatcatggttgatttgcatgcggctccaccactggttaaccctcagaccaagaataaaaaattaagtattaaataaaaccaaaaataacctaaacgtgcatccaccaaaaaaaaaactaaacatgttaaatatatcatttttattttcattaactaatcatgaatcaatgggtttattagttaattattaatgactgatgtatgatgtgtcaattacttatttgacctaatcaactcttcttcctatttgcttcttgatttctcattaagacagtgacatgtggttgcaagataatattaaatggccgatgaatcattatttattgacttaagcaactcctattcatgtttgtttcattatttctcgttaagaaactgatatgtggatgcaaaaataacattaattgactgatgtatcaattatttattgacttaagcaacttctattactgtttgcttctttatttctcattatgaaagttacacgtagtcgcaaaataacattcttttttccatttgttaaaatttatcactgaacttttgttattttccattaaaatattatttttatataaaagaccacaaatattatttatgaaagacaattttaaaatttactttaagatatatttaaattttatgtaagtaaacgagagtataaacaattggtttcataattgtcttcagaactgcaagtggattttgagtattaattcatactctaagttaatataaggctaaattaaaagtaattaaaatctagtatttcagattttatatttgctgaatgatctttacattatcaatagatatttttgaagaataaaacatatcccgtcttaaagtctgattcgcctttatctgtaataatttaagaataaataatatatatatcaaagatttttatattattatttaattataaactgttatgtatgatgaatttattattttttataataattatcgaaataattatataaaaatatttttactagttgagaatataaaaactttacgctcattaacaataattaaacttataatttaatttttgtacaggctcatttgtaaaggtggttaggaaggtgagggaaataacgtgcattggctgtgggtcctgagccgttggttcgtaggctcgaggattcaatatggtaggtacacttttaatggtagttattttttttgttttttctttagttattaaatgcagtagtactatttaaatcatgttgtatatgaaataaatgttgaaagaaaatatttaatttatgtgcactcacaatttttaagaatatttatctcttatttttagggtgaatattttgtattaatgtatcatggtcagaaaaaaaaatccttaaataacttttgattttataaaattgggtgctttaacaatattatgctattttggacaagaacgatcaaaaccaaaatgggtttaaaatcataactataagaatcaaaataaaatattttaaactataaaaattaaaaggtagaattgttgcaactataaggaccaaaaatatatatattataatttggaaaagttggaaattttcaagctttcatgacttagatattttcaataaaaaaaaacaaggttttcgtgatataaagtatattcaacatggttattaaaaaatattttcttgagaaaagtatttaattttaataagataataattaaattattttatagaaattaaatttaagaataattaattttttgtagttttttaattcttatgtaaaattgaattttagtattaatagttctatctaaataatttatatggataatatgtaaataattatgtaatttatcacccaaaattgaaaaagacaataatatctgtttatcgcttaataatataattctagtattagctcatttgtaaaggtgggtgtggccgtgtgggtcagtgaagcaacgtgcaatggctgtgggtcctgagacgttggttcctaggcttgtggatccaatacggtaccgtttaataataggaaaatatatatttttagtcgtcatattttcaatcaaaggtattaaaggttcatatattttatattgattaatttaattctcagttttaaaaatatataaatttagttgccactatctaaaacttcgccatattttttaataattaaaagactaaacttacatttttttaaaaaatttaaagataaaattgatgaatatcaaaatatagaccttgaccacatttaacgaaaagtatagaagttaaaaatattttttttctaataataatttcagttcactttatattttttattaaattaaaaatatatataaatttttgtgagtttcactatttatttattgagtttatttttaatttgcagttttaaataaagtttaatcaatatgacatttgtttccttttaattattaattttttagaaaaaaaatttactatctggtatttatttttcacttttaaatttcaagataacattgattattagtttgtcaactattccctcacttcttacctaatttatacattttatatgtatttattgtgaagcaaacctaaaaaatggtataacaggaaaattcaaaaatattaaagtaaagacaatcttaaaaagtttacaaactaagggacaacaaaaattaagatattaatatcagtttaacactttttgtgtaaaactaaagatatgatccacaataaaaatgaaattgagaaaatatcaattcaacaccttatttttttattcatttttccttaataatattgtttttcatttttctctcttatatttaaagggtcttaaaggagatgggtcagtgtccatgctgattcctcttgggttcattcctaacttgaacaatagtggcatctcttatagcgtatttggtaggaaggaaataaatagatgagagataaaaatgatgaaattagggaaaagagaaatagagtaaattgaaatatataagaaataaaatgaaatgtgagtgtcttatttaagagaaataaaataaataaatacaaaaaatccattttagtattttcaatccattattttcatgacaattgattgtcatacattttaggtagtttaatgttggtttcatatgaattttacacttttttttttattttctctctaatttccatcctattaaacaactcacatttctcatttattctttattatccttcccttttttctattttccttctatttcatagctaccaaacaaattggtaagccaagactttgttcttgctagaacatcaactaattatttaaaaataagctataagctaagagtttataaattaattgatttatttggtctaagtaacttgtataaactaataagaaaagcctataattttccccaaaaccttatcaaacacactaaaaagaacaatgcgggtaggtaaattgctttacatcgtgtatttcaggtctctttcatagctatgcttgataagcaattgatttgggtaatggttatttgttacttgacggatcattttgaattacctcgttaatactgtctataaacaaattatacaggggttatgattatagatgtcaaataagtcatctacctcttatgctcgatcaagctaacactatccaccgatacaaatcaaacaccgaaagttaaatttcaaaacttccaacgaatcttatgtgacttaattttttattcattccaattacaattttgttattttaggtattgtattcattcaattctctccgtcaaattctattagaggacctggttggtcttgatctttattttgtaattatgtagttgagattatgggactgtttatctatctcatccttttgatatatatttaacatcttcatatcataatacttgatgttgaagaattgtgtatcatttaattcttattgagttgacgtgttcaagacaactcggatgtcgaacaatcttattcaaatacgacattaccatataactcatattagatctagaaaacaaacatattacatttaacactttatgctcttaggctaggtttcctttcttcgatacacaatcttccggcagtcatatataattttaacttgacattggtaagccacatgatacttcaatccacgcagacaagaactaattttaggcctacaatttatttatatatatatataaaaagtgattaaattatatcgatataattttgacaattattatacaattctataactttcaactaaataatattttcttaaaactcatatttggttgaaaatttctttcacataaatcatatatacaaaatttcatattaatccaaaaatttattaccttattcatatagattaaagtcaacataatataaacatttcaaaatatactaaaaaatgaataatttgattatcttcttcttgttattcaatttcgacaaaatttgacataaataatctcaatactatatagatataatttaacgtttgaataaataaaaatcacattttatattaaattataaaaatagtataataattgttaaagttacatcaatataatttgatatctcatttctatatatatatatatatatattaaaagcgggctacagtttatatgtatgcactttgtttagttgattggtaggtggctcaaggactgcaagtgtgtctttatatgaaaaataaaaaacaattagtgtgcatcgcatgcaccccattccaaatttaattaagttatcatctctgttcaactaccccacaccaaaccactttgccgttgctccccacagtgctctgtaccaaaaacgtgaccaattcaccaatcactgttgtatgtaaaattaccttaaacttattatcaatttatttttaagaagacactattgtaatcgacttttttcatgtgcatgaagatattttttaaccggaaatttaaaaatatttattttataaaaaaatcaaaatgaattatatctatcttggcaaagcttttctacacaccctaatcagcatgctatctaacaatttgttggtttttttggtaacatcataacgtaatcgatccacgttaaatttacacagtcgcctaagccaaaaaatgtataaaagagaagaagaaaggaaaagaaacaaattgaagtaaataactatgaaaaattagtgaaaagggtttttatattgtttatctaatcataaattatcatatataataaattaattaacttttatgataattattttgaaagtcattgttttttttactgatgatagtaatgcaattttatacattagtaataaatgcatgcataaaaattataatttaatttatatatatttagagtttaaatttttttacacaatcaataaaaaaaacatgatattatggtaaataaaataattatagaagtcaataaatttcttatacatattgatttattattagataataacattataaaaattagggatatttgcatccaatctaataaaaaaaagcttgcaaactgatctaaaaagaagaaaaaatttgataaaaaaaatatattttaaacctatgattaggttcgatttaaattagtatcttaaaaagatttaatccaatccaataaaatatgatttgaattagattggatggttcaaatcttactactacatatattattatttttaaaacaaacataaaatgtatgtcaatcaattgattaatcatcttacaacataacggtgaaacactaaaaaaatcatattaaaatatataaaaatcatatatggaacatataataagatatgtatattaaagagtatcgtttttgcttagatcgatttagttttgctaacatcaattataaaccaatccaaatcatcgattaagaaaaaacatgatccaactcaatttgcagaagatgacttttatgtcaaaagtgaatctaaatcgatttaatcattcagcatcgagcagaaaaaaaaaaaaaaagttgggaaaataagagtaattgtaactcgtggctcctcccacctgagctgaccatatataagcactcatatcagtcggacacttgttcacttcttctctctctcgtaagcttctttgctcaacactttatcagatccgcgtttcgcttagcaccacatcaatatcatatttgcttctctcttcctcacttttctattcaccgctccttccatcttatttgcttctttatggatacattaagacaccattccaaattttattattttcttacaatctcgcgctgcttcttttctttttaaatttctgaatcatttcatatcaagaggtcaatttctgatgtttcacataatccatcgtacatggaattagttctcaatgattttgcatgttagctcgttaattttacctaaatgtgtccgtatttaatgttttggattacagattccattttcatctatcaatggctccagtagctgcagcatcttcagattcaatcaagccaagaggtctttcatcaaacattttggcttatagatatagagtgtttataaaccctttctttggttcatttaacaccttctaaagttttattctgtataaccctttatttggttagttgacttcatatgttttgatttctatagatgtttgcatcgttggtgttgcacgtacaccaatgggtggatttcttggtactctgtcatctctatctgccaccaagctaggctcgatagctattgaaggtaactatggaagcctatgtcagtgcttattacattccatttgaaacttatttgtgtttacatatttttcattcatctgtagctgctcttaaaagggccaatgttgatccatcccttgtggaagaagtattttttggaaatgttcttagtgctaatttggggcaagctcctgcaagacaagctgctcttggagcaggaatatccaattcagttatctgcactaccgttaacaaagtttgtgcatcaggaatgaaaggtgtgtttataataaaaacaattctatttgtttctttgtatttttgtttaaaaatacagaaaaaggatattaaccttgttccggttattgcagctgcaatgcttgctgcacagagtattcaattaggcacaaatgatgttgttgtggctggtggtatggaaagcatgtctaatgtacccaagtacctggctgaagcaaggtcaatattgcctttaattcgacactctccttaagattagttcttgtgttgaaataaactgattcaatactaaaagttcaggaaaggatcacgccttggacatgattcacttgttgatgggatgttgaaagatggtttgtgggatgtctataaggatgttggcatgggagtgtgtgctgagctttgtgcagataaccatgcattaacaagagacgaccaggtattttaggattaatttctgttcagaaaggtttcggtaggaccattgtaatcaattttttgttgatgtctctgttttaccctcaggataactatgcaattcagagttttgaacgtggaattgctgcccaagaaagtggtgccttttcatgggaaattgctccagttgaagtctctggcggaaggggaagaccatcaacagttgttgataaggatgaaggcctaggaaaggtacccatataaataacttgaaccatggtaatacttgttcttgtataaatatggtgagcctacgaaaacacatgtttacccaataattcacgagactttaaatttgttagaagactataaggtgataattaatcaagagttgggattggaatttatgatttttttctcttcacattaacaacatttatatgtatgttacttctagctgcaattattgttactatagtcattaattttgtctatactttcagttgaatacaaataaatatattgttaaatttttccttttcctatgccagtttgatgctgccaagttacgcaaacttcggccaagtttcaaggagaccggaggctctgttacggctggcaatgcttccagcataaggttaatatgttatcgaaatttgttaaaatttttcctacataatgatttgtatttggatgcccttgtcaattatttattgttataaaatactatatatatatatatatatatatatatatatatagggagtcaaatgacttttttaattggtcgtgtgaccttaaaaaacttttaatattgacccttcgtgtatggttgtatggtccaaatttgttcatcttattcttatatgaaatggaattttcaatatatacatctccaatatgtgtgtcttaaacgctcaaatgctattaatatttttgtaatttttagtttgacattagtgattagccctggtttttaataaaatgaaaattctcttgctaacagtgatggtgctgctgcactagttttggtgagtggagagaaggcactgaagcttgggcttcaagttattgcaaaaatcactggatatgctgatgctgctcaggtatgtaaaatatattttaaatatgaactacatcttcagactataaaaaataagaaatagaaaaaccattttggcattcacattatttctagtgtttgatatgttataatttcatactcatatgaggttgagctgtgcaggaaccagagttatttacaacggctccatcccttgccattcccaaagctattgccaaggcggggttggagacttcacaaattgatttttatgaaattaatgaagcctttgcggtaggatttcatgtcaaggtttcaatggtagtaatttttcaactcatgatgcggtgaattttaattcttcatattgctgtctgtaggttgtggctcttgcaaatcagaaacttcttggacttaactcggttagtttttccccttgtcactgtgcgaaagttgtaatccattagtgcatgtataataaactatttccaattgactgtcttgaagagtgcatgctgttgtaagtccagaacccctctttgcacagtgcagaacatgttaaaatttgtctataatccataatttaacttcattatgaccattaatggatgcacccctccatttatttcttttactcaagtaactattattttgcaggaaaaagtaaacgtacatggtggagctgttgcactgggtcatcctcttggttgcagtggtgctcgcattctggtgacacttttgggggtatgtgctcagttcataactttgattttttataatatatagtagcatgcatgttgacagattgccttgtgtttgtagaaaaaagtctatcataatgctcatctcttaaattctttgtttaattatttaaattcgttatgttcaactattcaaaaagataaagataatgtaataattttattattttgtccacttttttttaataaattacattgagagtagtttgttgtgagagtgaaatgaacaaatcttgatcatttgatcttatatgaatggtattacaacacaaaataataagatttttaaagtgatcatctgatattttaagtaacttataattctgactataagttgttgttgggataaggctttgttgttgttgtttatgattttgactaactatgtatggatctttccccaatattgaatgtgttctttttcgattcagttaatctaaaagtcatcacctgcaggtactgaagcagaagaatgggaagtacggagttggtggcatttgcaatggaggaggtggtgcatctgcccttgttgttgagcttctgtaagacctatttcatgttccgtagatgtacttttaagagccagcgtttgctgcaaagctcaaaagatcttgcctccctctttagcaagcgaacatgcaagtttcaaatttattacaaggacaagaccgaacgagagagaaatttagctacatagttgttaggtttaagtcgcatcttgtgaaagtgaaattttcttagcatcaaagtagaacatgaaacaatattatccaaattttagttttcaccgaaattttattggggtactttggtttggaatgaatcattataaaacctgttattccaagcacaagattacagattcccgtggtttgcaaaatgtgttccagaactgaaattgccaaaaaagtggaaataatgaagttgtagttggtcttgcgtctgctaatttagatctaacattttattctgaatattctcgcacgccaagcacgtcaaagtattttctctttcttagggggttggttaaaaagattcacaacacgcagtaggattgactaagcattccaagatattttttttgttcctaagattaatatgagaaatttacagtgcaccgtctacattaagtttttgggttattattgttattgaagtaaaatatttatcaatgataaatatctattaaaaaatttgactaattatttctattagagtttttttaattatatttttttcatatataaaatttaaatttgagatcaagtttaattttattcgaattaataagatcttgataattaatgctagctttagatagaatctattctacttattcttattgcctttatttttcttccagttacttatataaaagagtaatgttagcgcatactttctactccatttggtaaaagatttttagtttggaagattagtggtcaagtgaacgacgaatatttcttgaacttttgataactaacatgaaggaggaataaaagatggttatccaaccaaatacgtaaacatataaaatcgtaaaattaaaactataataatataaaaagaatcataaatggtaaacttaatatatacctgcttaatttctgtacttttatcacactagtttttgtgtaaagaatgaatatttaggtgagagattttaaatagaaaatttaatttgtaagagaatttaaaattttaaatattaggccgattgttatagtttcttttatgaaatattttttttccgttttgcatgattttgtttcaatttttcaaaataactggaaactaaaaaaaatatgactaaaatcagaagttagtttgaaaagtttttcataaaatcagttatttcttaaaaaaaatattttttagaatggtaaacaaaagcaaattaccttatactgtttttttaaactattttacatgagaataagttttatttaaaagttgtatttgttttatggtatcgaaaaagattatcgagaaagtgactgagaacatcgtattttcatgtttgatataagttctataaaaaaaaattattgatttatgcaatatgaattatttatacttgtcattttattttcatggtgaaatagaaattatttttttggaaatggaaaggtccatcttacattcccataaaaaatggagctattttctactatgtcctcacttcattctttcacttttatagttttatttttaattttttattgaataaatttttatggaaattatatttgtacgcataatactagctgacctatttatgaaatttcttttatgaaccctagcctagcttgcctcagcttcttacgttttcgcgctctctctctctctctctctctctctctctctctctgttgtgaatcgagattcatcacttaaactcggcccattgtacgtttctctttctcatgttcgtttgctttcgattttattttgcttcctaacctcattcttttccttctttcctcagctccgctttcttcaaatcgtaaagttttttgggattgaagaccgaatcgttagtgagttttagttttaatgtttgtctgttacaacaaaatctttgttctgttctatagttttcaaccatcttgctgctgattttgtgatgttcaccctttctaagctctctcttgcagtgttactacctctgcatgtacttaaaaacttgttaggatttcaagcatttaaggttgaaaagattgtgtctatgagaatggagttgaatgctttccccaagtcaatttcaagtcagttggggattttagcctctattttaggttgtaggatatattggtatactgacctgaactttagtaaatgaccttttttgaaaacctattcagttcacattgtttctattggcctaaatttcacataatgggaaaaatttgggacttcattggtggaatgtcgtgttcaagtgagaagcatgggacatacaaagaaaaagtgctaggtgaaatggtgaatcacccaagcaataaattactgctatgactcatttgcttctcaatcattttgttcgaagtgatatttttggagtttattaagaaattctacatgtttagttgttcgtgttctcttatttggtttaatctattagaaaataatgaaaatctacatggtgatgctcttcatcttatccaaattatgtcaacccttcagcactattccaattctaatagcctatcatcttactgacgttgtcttatagtccaattgtgtcatggtacaacttcaatatcctcaacacatcccatctccctaagcaacaattatttttgtacaaaataatcaagaacctaagataatgagagaagactatgatatatagaaatatcgaatagtataaaaattcatttaaagaatttgatattatacacacacattattgtttactaacctaatacctattaagttacacaaaaacctctcatcaatcttcaatcgtatattttagttctgaatattcataaaatttccgtgatatgaattcatcattttatttttttaggggattttcagggtacaatggcttccaacatctcgcccactgcctttgataaagaacaggtaggcattcttttctcttcctccaactttggtaaaactgatctggtggttgatgtggtgaatttgataccccaatgtgatttcaagtttaaatttgcttttctcggtgttatttgattatttagttgtggatgtgtttcaataattcatgtggtcatggagcagatatttggaatggctgaaaaggagatggaatatagggtcgaattattcaacaagtaggtttccctgctcttgcttgccttgatattgtttgctgttgtaaacaagtatactgtacaatctgactgcatatttttatgagatttgttggtgccataataattcattttgctaaccttctgttgtttctaccattcaggatgacccagacctgtttcaagaagtgtgttgacaataggtagggaaactcttatgattgcataatctgcctgagaaagtgtcatgtttgatgcccttcaaatgtcatccagtccagtcaatttggaaattagtttcttatttctcagagttatctgctgttgcattattttgataatggctcaatgtgaatgttatgataatatctgtttatcactttttcttctcaggtacaaggagtctgagctaaatatgggtgaaaatagttgcattgaccgctgtgtttcaaaatactggcatgtaagatgttgcttaagtttactttggatctatcactggcacttattcgagttgctattagttatccttatttttctctcatcaaactctttattatgctttaagatagtttctcacatagatgttttaggatgaaatcttagttgggttttagtacttggttaaatgtgtgctcccttcgaaaattcctggttagactttaagtggtgtcttgataatttcatgaaagccaaggcaaactaagtatatgtggattacagaagtcctgacttcaatatggtttttgcttttgaaatattgggaaactgcaaatggtgattgtcttattgtctaagcagattttttttatattttttttgctaggtgactaatctagttggtcagctgcttgggtctgggaggcctccaatgtaattcaagtgtattgtattttcttttgcggttagcaacctgggagctatgtctacgatattattagttgttgcttccttggattcctttcttcccaaggaagcgtaaattttaatactttgcagagtctttattttgtggtcaatctgctttgtttagaaagggattgatgagctttttttaggtcttaacccctcagtttatcaggggaaaaagatcctaactaatttggagtttggctgaaagttcaataaaatttgacaaaaaattatttgtcaaggattgatgagcttttgaggtaaccattggtggacaataaaattaattttagataaataaggtcattctttgtttctaatttatgactttttagttctgccgtactttaccatagtgcttttctatcaaatttatttaaactttatcctcttgcaactgcattgttcttttcccccgttcgacgttatgcagttagaaacttaagaattatttcttcctttccgttttcaaacagtatacttacttacaattattcctcgcccactttcttgattatcaccaaatatataccacaaattcaaatcaatatattaatacctcaattgtttttttttaaaaaaaaaaaaaaacttgttgctatggttctgctctgacatcaagtgtcttaagacatgttgaagagtattatattaaaatgtgatagaagttattttttactctgtgtactaaacaaatagcaattacgggagtgacgagaatagagagggtattgcaacataactttcataaaataaatcatcgctcaattttgtaaattaaaacacaagttcgttaatatcgtgttcaaccatacaatcattctctctttcaaatgggatcaaacttcgataaattatgacattcataaaagtatgtattgggattaatacttttagagaaaactcggtttgatttttaaaagttacatatgccatcattgcatttgaatctaaatgcattattttcatagttataaaagattgataaaaataaaaatctaatttacttagatttaattccttctcaaaaaaatagttacagattttatcactgagacatggagacgttccagaaccttttgctacttcctgtctatgaacttctacatttctcagagatagatctaataaatgggggttgacttaggtcacataaattaggagatcaaagtgataattcttaaacttagaaaattaaaatgagatgccaaagttctattttagtctttatataaaatatgttaaagtgttaaacaatagcattacaaatactattttctatgaaaaattattgtagttaattaattaataatagtaaaaacgttgatgagagtggcagtggcagtggcagctaagtcgataccgtgcacatgcaatatgcatgagaaaatggaaaaggaaaatgtaaaaaaacaagaaataaaatagtagattaaaaggaataattccaagctagccagaggcaaaagtgaagtgaggtaataaagacagctaatgtgggtggggacagaaaagtggccgttagaaacttgaacgttaagccgatgacagagaatccaatactgatataaatactcccatttctgagtatctttcattcactcaaaaactagaagatggggatggttgtggtgatttctcttcctttcataatcttctgcttacttcttggttttggatgttacttctttggaagagccagaggaaggagagaggttcaaaccaacccacaagtttatgtgatgccaactccacccccagctgcttcaccttcaccaccccggccccactccaagccagacaatactcataatgtttgatttcaaatacatattgggtttcttttgttgtaattatttggtccttttagtaattcactccaataatattaagacctctcccccattttattcatttccataacctctatttattttttgtcttttatgtactatcccttgttttttggttgaaagttaaatcaacttttatacatttttattgtctgaattcaattttgctcaagttgtgtttatagagccgagcattccatagtgtcactggcctttgcttagtttcacaaaataccatcaatcagtcattagtctttacgatgttgggaattttaaaaccaaacaaattctcggttaagttctttcttttttttacaggaaaaaaaattagatgttatatttacgtattttttatattacttttttataaaaataaagtttactttgttgttattgttattttcttgaaaaatatttagaaaataagaaattaaccttttgttttgtgaacatgtaaaatcaacgttgaaaacatattctccttataattaatagttattaaaaataattattaattatattccctttatttaactttaataaggaacaataaatctaaattaagattttgttaacataaatctttaaaattaatttcaaacaactaagactaaaaagtttaatattgtacttttatatgagaaaatagttttatcataatatttgattgattgttataaaaattaaactctttttttagacaaatttaaataaataattttttttaataaatattttgaaatttgggactgttttgaaattatttcaaatttggagcaatcaaacaagttcaatttggacgtgttccagtctgtcgctaacattttttacggaatattgagattttaattccgttgctatttccgtcactaattcggtctctaacacttctaaaaaatagtggttttttaaaatgtgttgcgactgaatttgcgacggattttaaaaagcctcgaaaagtgttagcgatcgacttagcgacggactgaaaaacgcccaaattgaacatatttgactgccccaaatttctaaatagtttcaaaatagccccaaatttcgaaatatttgttaaaaaagcatttttttaaataatttgcccttttttatatatgtgtgttatacaataaataattttatttatttaatattttgttcacttataataaaatcagcagtaaagaaagcatgaaaaaagagaagtgtatgtctcataaatttgatagtcattgacattggcctgctcctatgtgtttgtctgtgtttctcgatcttcctccttggccttgccctcgagaactaaaaatcaaggaaaaggagaaggatcaattaacaaacatcattacataatataatataaatatatattagaagaatctaacagttaaggagccaaagccacatcattcaattcctcgatctaagatcttgcagctagaagttaggagctagtgatgaaccatggcggtacgtacgtacgcagggcggatgcaggtgtaagattcccccccttaaattttcaagaatagataattttttgataacaataaaataaaataaaataaaaaatagtttagacgtttgcacgaaaggagaaattgaaaagcatagaaaaagaataataaaaaagatgaaaaataagagaggagtgagtgtgagtatgtatgtttgtaatttttatgaatgcagtgatcacactcttgttaattttaagcaccagtcacacgctaattttgtcaattttttctctcttaaactgaacctttttcacacttttattataattatttgtttctttattttttattatgtgcccccttacttttttttccggatccgcccctgtacccacgtacgcatgcaattaattaatatttgttgatggatggctctgtcaggagaggggtagaggtagagcattacctaagtttggggactcgggagttctcggtaatcttcaacaatgccaggaatgagagaaggagtggtgctaataacatgtaacttaattaccttcttcttgcttcatgctcaatcccggcccttacgttacgttttttcaaatccatcattgcagaaaaaatggttttgctgcatatgtggtgtatgtacttgggctttagttggatcagtagtatttattgcatcatatactggtatacttctctctctattctttatagtagagtttgatatttgtgtataaactatatacttatttattcgatcgacctgcgtactattttatatatttcttattggattaactgttttatactaattcatctctctcgaccctcggtcgagtcacacggaaaaaaacaaaatcataattacagaaagttgattgcaatgttactaaagagatgccagtcactctcctgggccaaagaatttattcttaattttaaggatttgatattcaagtgtgtaaactgtaaagtgagaaaatggatatgtatctatccctaattgaaaatttgatatttaatttacataataatttgattcaaatttaagggttaatgcacgtacccttacatacctttgtcgaggtaaattattcctttaccggtgcattgtacttcgtgaatttttcctgttaccatctatacctaagcttagttatgagccaatccgcaatcctattttttatcttgtttatttttaagctataataagttcttaaatgctgatagaggtctatttttttatcaacagcagcaattattttaaattactgaaatgggtataaattatataaatgaataagtcgtgttgattttagtaaattaaattttacaaaatatacaaagtcgtgtttaaaacatgactttttttgttcaaagttacgttttataacacgatttacctttttttttaaaagaaaagtacacatttcggtattttttataataaaaaaaaaatacgtgtttggtaaagaagccgctgatagagttagagattcctgttaaatatggcacgactcgagaatgtaggttaccactgcaacttacattcaatatctgagagagatcttgctcacaaaatacatatgaatttctcaagagccgtaacaacttaagcagctgaaatagagtgaagggaaggtggattggatacttaccggataagaaaagaaggagaaaaacaaatctaatattctaacaattaacatttaccgattaaaaaaactggcagaagtaaagtaaacgaaaaaaagatgaataggacatggtgggagcgtagaaatggcctgtcattttttagtttaccggaaaaagaaatcaactataaacaacattaaataacatatttccacatgtattatgagtaggattgaactagttatataaatatccatgtgatgacaacggaaaaaagtttaaaataacattctcatttgtactgttacagattctcagaacatttcgaagctctaaactctcgaggtacccaactttcgttcaaacaatcgctgcagaaggtagacttgcagcgcactagccccaatcagtgctgctgattcaaaaattgccttgtgtactgctcttttgctcattgcatcgttcactgcattccagacataagtgaacatgatattgcatccgcagtcaagaagtgttaatagaaggaagaaaccagtttgtagcttttatcaactacgatgcttagtgtatttgttcagtaaatggacatttcaccataatcaacagtgaacagtgaacattgccaaagagatagggagcaatgttctcaacagggaggtctcttttggtatggtatctgaataaattaggatgatcacatgttgggacatttgttcatattaaatggtatcaagaatagaaaacaagagggcatacataaacttgggtttttatctttaacacgagtaatatgtataattgataggtataaaagattttatgcacagaaaaatgtaaattgtgcgataaacagcaaagtaaaccttaaataatacctattgcttggcggtcagtctgagcctctaaccaatgttgttcaaactggatgttgtatagagcttcctccaacttcccaatctgctccagcaaaggggtgaaatgctctgcagacagtcacaaaaagtttcaatgaaagttctcttattttttagacttccatgtaacttaaaagagcagtgttttacattttttttaaaaaaaaaaaacagcaaatacaagtggacctcatagaaggggcattaccatcttttgcatgttgctcaaagtaagagaagtgaccaacatgtacatcaaaatcaacagtttcatgataaggagacttgttggtgaagcagaatttatggaccccagatttgtgagccacaaaatcgaatttctcagttgccttgtcccgaaaatcttgtatttgctcgccagaaggtccctttacctgaaattcttacattgtggtgtaatgagattccaacatatgattgggtaggtattaaggaaaaagaaagaaaaaaagcatttcaaagaaagggtattcctaacaattgtgtaagtaccatttatatgtaattgtaaatgtaaaaggtgatacatgtaaattgctacatataatgcacaacatctctatgaccactcatccttctctaaattaaagaactactgttttgaacaatgaagttatctcctaaaccattgataaaactttttgcttcattaggtgtttgacaagcattcgtttttcctataaaaactgtgaactgttttgcacagtgtagttatctcctaaccgtggcttcattaggtgtttgacaaacatactttttgcttcatggtcaatgaattaaaatttccagaatggagttcaaggctttaagcttaacaacggatcccaagatctagaaacaaataacagtttcatggttatagtgaagaatagcacagaaagcttcttcagcccagagagctacataatagctttagcttcacaatataaaagaataaactattaattttgtccctcaagtattatcctgtctattatgagagtagtctctggaataataaaaaaactatataaataattcctcaagtattgaatattcatcaatttaattagtctcaaaggtgatgcattttagtaaaattcagagaccaatttgaagggccttttaatacttgggggactaattagcatgatttcaaatacatgagaaattacttatataggttttttacattagggattacttatgagaaagggtagtatttcaaagatgaaattgagggtttgttccaatattaaaccctaaaccaatagccaacaggtaggcgtaagagaaagcaattattgttggttctctttgtattcatgtaccctatggttctattcccttccctaaacttcctgtcaataatatatatgataatattaatagcttgagtaattgtgataccccttgaaagtgataaagctgaaaataaaagcggtaacatagaatgagatggagtgaaaaagaacataccacgagatcgacaccttcgtcgccgtaatgccagggagaatcagccttaataacaacaaaagagacatgaacagtgtcaccctcgtactttacatcatgggagaaacactcgtctctgtctatcacaaatcggataccctctgccctttgcaagttccacaacgccccaattaacgcaaacaccaaagcatgcctcaatgataacctcatctgcaaaacaatcgattaaattcacacacgtctcaaaaacacggatccacaaaatcaaaagatatatagataccttggtaagtttctcttctcggaaatttgaagaaaaggatggagatgaaacaagaaaacacaacacaacacgacacacgcagttgtggtttttaatttcaacgtgtgtttggttcagactttaaaagtgttttgctggaaactcgaaactggaaaacggcgtcgttgccctaacttcggcttttctaatgtgtgggtttttgattggacggtgtaagtcatcgatccaataacaagttcacacgtaggatatgtttcaaaaacaacaaataactctcctcgtcttcgtgtgcgaagtgcaaactaacacacgtaagctgagttcagaatctcgtctcgtatagcaatttgattcagatcagatattttttaatcaaataataataataataatttttatctgtgtaaatgcggaaaaaaaatagttgaatgtagtggtgtataactttctcatattgttatccaaaattcattttttatttacgtaaaaagtaaaagaatcatgatatgttaacgattatggttaaggcacttctagttcaaaaatatagtgcatataaataaatttgtaattatttaaaatatatttacgattttatatttttaatatgataaataattatttttaagaaacacctttttataaaaagtatgcttaagaaacaataataataataaaattaaatcctaaacccaaaatattttttataaaaagtgttgaaagtaactaaaaatattttttaaggttcaaacttttaaaattatctttaatcatattttttaattttaaaagtttagattttaaaagttaataatcaaagactaatttgaaataaaaaatgacatgtaatttaattagttaaaaattaacaatatcaaaattccaaattactgggacaccatagaaattttaaaattacatgtatttagactattaatattaattatgaaaataagatttatgatattataattatagatattaattttttgaacgtatgattttaaacgaattgaacctataatgggttagaccattactgttagatacttctgttcacagtttattttgaggtaataacaagaattcgatattcttttcaagtacatgcctattaatgttttataaattataattatcattatatgattatgactgtgcataattttctttaaataaaaaattgtcgctaaatttgcataaacttcttcatcattacaattattaatttgtcattataaaaaaaaacaaggatatatagcatcatacctctgtagccaacaaataagtctcaaaaataaaatacaactagcagatgtaagaacttaagcctttttaagaaattccataacatgtgtgttgagaacacaacatgctattcggaaaccatggaatccagctcctttagccaaggccttgtactctttttctgttctctcttttccacttgggctatgacacaacatgataacatccatttgaaactcacaccttgcagctaagttagaatctggggtttctggacaaataccttcagccaaaatcacttttccagtgtcgtcaggaagggaatcataacaattcttcaacaatttcaagcattgctcgtcattccagtcatggcatacccactacatacaaaaattgtattgtcatgatattattgaaatataacattttaacttggtttggctctttccaaatataatcaatataaaaacttgaaaatggactgtttaccgaatgaacatcatattaataacataccttcataaaaatggcgtcaccttttggaacactcacaaacatgtctccaccaatatgttccacacctgcaccaaacccccatattagttctataatatcacgtacaacaaaaaatgtgataaattatttaactcatcttttaaaaatccaaccaatcattaaaatattaggtgacatgaaataccatattaacaaagtcataaaaaataaagttaggttaattttaaattaacataaaaacaccatattataaattgtgtaagataaaaaaaaatcttaataaaagtgatagcaattcatcaataaaccttataaggccttaatttgattaaacaaaacttggtgagtaaaagaattttaaaattttaaaatgaccagttcccattgataattttgagttaagagacttgccatttggtcaaattccgatttttaagggttcaaggtcgttgctttctgcacgctttgttggctttcggactaatcaatccgaaatgtaaaattacattccaaattagtaatacattttgatttacgaactgaccaattcgaaagaaaataaaacattcctgcagaaagatgcaggaagcaatagtctggatccaagtaggaaaaccaaacaacacttcaaattaacatcccaggcccagcaataaatacaattattatatacaaatgatgctactattaccaaattaattatcacaggaatgagaatgtaagaaagatccaagttagaacactcgcttagcttattttttaatttttttatagtcagtagagtcaatccaaactcgtaagatatgaactaaaaagcacctgtataagctggagcttctttgatgacgtggggtaagtcaaaattaacacactttgtggtgggatacttagaggcaaccatattaataatagctccagtcccaccgccaacatcaaccacagatccaacaccctcaaagccattatagatctcaagaattttcttcattgtgatgctagagatatcagacaatcccttattgaaaagcttgttgaatctaggatttgtgtcatggaattcaaaggcagtcattccataagcattgctgaatggatgcccaccctccttaactgaatctgtcaagtggtacctacaagaatacagtcctttaaactctatatctaagacttcactaatcactaatcactaaccactaattatatatataaaaagtttcgttgcaagtatatttgatttatgctgctgacaatctttactttatagtgacatataaaactataaatatcattacaaattctcatttttaggtgagaatcttttctttagaggtaagattatacgaaagaacatataaaaggctagtatagcaccaattaaggaaaaaatgacaaaatctgttaagataattttgacatgtaaagaaaatcacaagagatgtcacttaaaaaagtagattgcattgattttagtattgtgaaaaacaggaggagaccaagaaggacattggagcaagttatcaagaaagatttcaagttttgatttttaaacgtgttgaaagatatcatgtgatttatatagtcaatttcacttagttggataaggctttcttgttgtattacaaattaaactctcttctttatagtgaagttacctttgacatctaagttcattggctaaaattttgttggcctctttcttcaattattttggcaaaaatcgcaaaaaaaaaaaatcctaagcgttctatctatgccgttttagtcatatgggcaaaggtgattatagttattgaattattcatacttaacattttatatcaattaatgggagttaactgatacctctaactctaactttgctaatacaataaaatcaaaagggccagaagaaagagagaaaaaaattaaaaaaagtgttgaggaatagtgaaacacaataccacatgtctttaaggactttgtcctgttccatgagaaagtaagcagccacagagacaccatcttcattgttgacaaggtatttggcttttgggtgaagaccatagtgcctttcagccttaccatgaggcagttgatggagtgtgtaagtatgttgtagctagccaagaggcgcaacatgcggtccagcatagaaggtgcgtgagggttctttattgctgggatctcagcagctatatgagaaggggaaaggtaagctccaggacctgccttggctatagctccaaagctgacttgagaaccatggagacagcagtgccacccgctagttccatgccaaacaagaaggcttcttcatctgatactacctccattctgtgctaccttataatcactttcaacaggtaaacttcagaatgactcagaatctaaagtcacacattagtcttactgttatcaatgaactaacaaaattataatctcacagattctcacaactcacaaagactcacacgcagcggaaaaaatataaaccgagagagagttatctaacgcgcacacacactaggaggaagagagaaattcagcttaacttttactcactaattccttcactcactgcatatttttaaaatgttacatgggtggcctttttataggcaaagttaatacaataaaatattataaactaaatggctaagaatgaaaaatggtgcaactatggaggtgccgcaattgccgtatcttggacaattcaattcagtgacttcttcattcatctagtgaggcggttgcattttttttaggcggtgaaaatttgctttatgttgaagtataaatttgcttgatttatcttaccgacacttactaaccttaattaaattgctccttcaaatgatattttacttgaccaatatactttagtctaagaactgtgaaagcttttgccactggaactcctccttttggtttagaaacacctgaacaggagaaaacaaagttttcagaagaaaaaaaagtgaataatactatttgatatctcagacagcaatataagtttaatgattgagtaatcttagatagtttaaaagaaactgcattgagtaaatattagttctgattacaacattatgtaagtcagtccctaatataattatacatgagcagtattcagttctccactgtcaacctacaggaaacctgtgaacagaaaaaccaggtatacttttcttggtaaggaaactttggctacatgggaattggcttaaaacactatctgcgtgtgtgtgcaaccccttctcactttcagttgtaaggtaaagtaataactaaaaaggagctagtcctcatgaaaaggaatgatgcaaaaaagtttatgaagaaccctttagtcctttcgacaagcagaaattaagaaaagtttcagactaaaagccattataccctgcaactacctcataaacagtgagtagtttttataaattactatttatagcaattaactcttaactaccttgctgacccatgtaaacgcaaaattaattgacttgtgaatcagttgggtttgttatcttcatatttcctcttgaatacacttcagtaataggccccttattcctgacaaacacagatgcaatagaatacaacttgaatatggggatacaataaattctaaaatcatcatcacacaacacgtctacaatacaacgtataaaattagtagtacaaaattaacataaagaggtactaaaagtatttaaagtttttatgctgcttgaattgaaacacaatgaaaaacccgagagagggtgagagatcgatgaaagtgagattgaacctgagagaggttcaagatcgagttgagagggtgaaagtgagattgaacctgagagaggttcaagatcgagttgagagggtgaaagtgagatttctaaaacttgaattataatatttcaatcatgtgaacttacagtttgatatgctcaccaatttataaattatattatgtttataaagttaaattgattatagaattgaaggtaataactttattgatgtataaattttattatgctttttaaacatattattaaattaaaaaaatgtcaaatcgattgaaaaaaaaatgacaataagaattgtccttataaaaccaaatggataagtcctcatttcacaatcttgatatcatcataacatgtattaaactaaaggtcatctaatggataatcattaccttcattttgtgatcattaatcaatcaataaaaataatcaaatattttaagatattcaaatacactttaattcatgaacacaagactaagatgaactcatgtttcccaaattgtaaattcaaacataataagatggataaaaagtaataacaagttgaaactaaattactgcatcatttcacaccggtaataatcactaacaaaattaggcatggctaaaacatctatgcaaatgatgatagcccataaaacttgagcagaggatcaagccataaccgtaatcaaagaaaagaatatacaatattttaacttaataactcaacgccataatttgttaacatgattaatcaaataaaaatagttcacgtcatacaaagcccaaaaattcaattttattgtaatttggtagtttttattgtcaagcaatataaactcaatacttacagttaaatatcaaaaaactaactcatagatagcaccatctattgaattggaggatatttttgaaccaattaaaatctatcaaacttcaaatcaacttaaagcaatatcacattatcaaaaacatatatatgattatgaaacacaagacacgaaagatttcattatgataaataatgatattatgtcatgaaggattcaataatttaagtcctggtacacaaactaccaatgtaaatacatacatgtctcacggttaaaagcctttgatcaaaatcaagcaattatagacatacaattttttttaattctactattttgaagtgttaaaagaaaatatattcatggaatactataacaacatattgatgatagaaactgagtgataaggaagaattttgatgatgcatatatacaacgagaaaaaatgttagtaatacacagacaatttttataatacttaatacaaaaaaaaatttaacaaaggagagtctagaaaaatatctgagttgaagcgcgttatgcgctgtctttacgacaatccattaattcaatggagtgcaacgaaatgatcttgaaccaaagaacattgggctccaaaacatataattgtaataatataatataatttaataaaaatgagaactaagcaaatggtattttgatgtaactgtgtgcgtctgaattttttcttcttattttttgtaagagaaagttatatataagaagaagcaaaatcaccaatatgcggtccaaatatcacacctaacaaactaataacaaacataacaataaatcttaaagcacaaatattttccaacaccaaatcttgatagtttaaaacaacaaatctcaaactccatatatcataatgaaaaatattttccaacaccaaaaccagggaatatcgtatgcacttggaagtctatctaaatctgggatattgcaattaagctatttgctgctgttatggccatttagcttaactgagttagttgcaattaatgatttcgtaaggcaataggtgtgccctccaaagtcgtgaatgaattaagatgtaactactagtagtaaacctgagactatcgtatgcacttgaaattaagtactactttgctgtctacctgaatctatgacactgaaaatgatcgatcaacatcaattgacaacataaggccgtttttttcaaccccttccacattttgctaacgtacttatccttgccaacattaaagggtgtggccgctggcgcgcgagcgagggtatgcattgcgtgtggtgcaaattatttatagaacacttcattcttctttgcacccgccatatctaatgggaggtgtttagtggatgagttccttcaaaaaaaattgggtttctaatataagaaactctttttagagtttcttatttttcaaacatcaccaatcaagaggattttttgaaatttattgtaattttttgcatttgaacaaaatttgattagagctcttataagtgacatgacaatgtaggaccacaaaaagatgagtaaataactttaaaaaactcatataagcacctgctcttccattgcaaaacaacaaggcttcgtcatcctctacacttacctgctgcttctgattcactcccataactgcttcctcaatgttgttctaccactgccacatatttagaaattgtctcgtacaaatacttggtttcaacttttctccatacgtcataaagtctaaaggagacaccattgttggtaaatgaaattctcatgattatcctatctaacattttcttaatagttcaaatgtactcttgttttcaatttcattgagatataaaaactttttatagtttgatttttaccctttttaattttactatcccttgacttaatacccatattaacgacagtgtatctaattacaatttgtttatattcaaatctttaaaatcgtccaggtcttattgtgaaaaaaaaaaaaaagctgccccgccacagcaggcgggttgcttcctcttttagaagaacaagaaaacaaatgttttggtgttcaaaccaaataaattgtttcatttgataaatgtttagaatcataccagtatggtagcacaattttctaccaacataaatctacataaaatgtattttctacttaaaatctaatctatagatatatatatatagtgtgtgtgtgtgtgtgtgtgtgagagagagagagagagagagagaatttaatcaaattttagcttttaggttccaaattcttaaatttatttcacaccccaaataatgattaaaaagttttaacttgatttactttattttaaaaaaaaattgcttaaaacaagttcaaacaccaaaatcacacataatgtatccagtatccgaacaaatatataaacagaacaaccaaattatatatcattattctaaaaagaaagcgtgtttttggtcaatataaacagaaacataaaaaataaagatatcgaataaataagaccaacaatgggctcaattttggagaataattacaactcacttgatatttcgttattccttgggccttggctttgaacatatgctgggccctagggtgcaacactgtcaaatgtcaataaatattagcagatatgcgttaattttgattttgaaatacaagcaatttgttcaccttttggtatgagcatcgattcctacttattaaaaagaaaattttgggaatatgcaatggattaacgtcaaactgtttcactgaatcatttcatgccagctatttttgtttaccaaacataccaggtaggcaagtaatattattattattattatttaatataaattacctgcttcagtcccattagtattgtgtaaatcaatatcaaaaaattgtgtttgactttattttatgtttttggtgaaggactttatacgtcacatttcacttacgaacgaaatagaaatttcactatttcagtaatagtaatgatactagtgtagcccatatttgggtggctatgaaaagtgtagcatgttttacaatgatttttatttatttctctcgtgagctacttcgagtacgttgtagtgttgtacacagcaatgtagccttcagatccaccattggttgaaaaacaagctataaatgacaaaaaggaatagcataatcgaaataaaattaatggtgataatgataaatgtcaaatttattgaatttttatatatattttgtgatatttacttgacattttagttaactttagactttgttttaaattcagtttttattttgtcttaggaagaattttatgttttagttatttttaataaatttttttatattttttagcaaaataatgggtaattctgacaagagttccagaggttcaaaatcagtagaaaattatgtaaggagaaattgtgaagaataaagataaaactaggaaacaagatatttttcaatgataaatcagatgaagaataagataattatttgaaataattagagatattatttgtttgtaattttttgtaatccttttccttattaaacctaattacaattctataaatagaaggttaaagtatccattgtaaaatagtaaagtcccgaacagtttttagaattatattttagacttacacctactagacacattcattattctattagacactttagatttcattgtattatttttatgagtgcaatttcttccatctaggaaaggaaatgatgaatcttgtttcactttaattttatcaattcaacacttcatcttaagtttttttatttgttttcatacttaatgtttttatttgattggtcatcttatagataaattcaagaattgacttgcgctttaacgagcctggttgaaactcgattatgaattaagtacttaattaagattatctcgagggatagaataatctggattaaatctcgctaattctcgaccattgatgttgattgtttgtatccatatgtctaagggattgagtattgggcaagtagtttagaatatgtgaccattcaagagctgggtagaatacattagtgaaccggggatgaacatgagagattactagaaaattgtgaagttacggtggatcgaataaattccaagtccaaacttagatattcattcatcaggatcaatgtcaccatcaaagtctaatatttctatttttacttaattattttattgtcatttaattttattgtaatttattttattttatttatttcgtgacaattacaaaaccaaaatacaaaaatataatttttagttaaataattatatgaaatttctgttttattattttaaaaaataacctgaacgataatttaattagtacatcgtaattgagttacatttaacctataaattaaatctaatatgaaataaaattttaataaataacaatcatactatgtacatgtacgtgattgttttagcttttgtgatccacgtttaatccaaattcactctaaagcaacctaaaaacaaataaaagttatttcatggatctacgtccaaatatcattggacagatcaccaaacatactatataaccaccacatccaaagtcatatgatctgaataatattattttcactatattttcacaatactttaacttttatacattttttctctatcactcattatcacatcattttatcttattttacacttttcttcctattcttcctatgattgttcttgttgtagaaattgttaatattattaagccttactagataactagtgtacaagtaaaggatctaagatccgagaaaaaagtctaaagggaaactttattcataacctttgctttaacaatgcagtatttggatattataagagtaagtattaatttagttctttttaatttgtattatttgttaattgatactttatattataaaaaaaataaaaatcaaaagtaagatattcttgtatttaagtaatagtcaattaatttggtctatgtaattaatgatattgattagattatttcttaaagaatttattatatatatgattgtttaaataaattgtttatccatcttaaatttataagatttataatatcacgtaaatttaaaaattttacacaaaaaattactttaatactaaagttactacgataactaaattttttagttacattaaattttggattgaaaaaaacgttatttttttttagtaataatcaattaattgtataagtaactcttttaaacaacacattatcaaatcatcatctccaataaatttttttattaaacaacaatatgtaactttaatcaactcatttaatcacccgctttaaaaatgttgtcagtattattaactagattggtttaactttttttactttagtaagccaattcaccggtctttgacgatagacatcaattaaatgatacacattcatttcatagatcaacttgatattcattctaataaacttgggtggagttttttttttttttttttttctttaggaataaattggtgaaattgtgaaatatacaacgttctttatttttaattttctcttcctcgtagctttttttataagccttgcacgagaccactttcatagcgagtttttccttaaataaaaatatcataataatgacataccacgtgaatggtctttatctttgtaccaaaggaagtaggttggtctcatcagtgtgatgtgcacttattgtttccttttatttatttattccttttctataacatgttttgttatttccacgatttaatattcccacgatagcaaaatattaatctaacaaattaatacatgagaatcttttataagttcagagttaacaaatatcaaaataatgtttgtttgtacgaaataagattgagagaaataatcttataatttttatagatattggaggtatctcattttaaggttgcgttaagtccaacttttttaaagtttttggtataaactataggtatgttttatgggataaaatttatcatagataacaaatttttatttacaagtactactatttaaaataatccctcctttgacacttcttatatatatagatatatatttttaagttagttaatataaaattgtataataacaattaagattagttagtgtaaaatcatgtaaaattagttgtgtttattattatcattgtaatgtttaaggtgataactagagtaaaattatgtaaaattaattatctgtttgttatttttatgataatggttaaggtggttattatttaaaataaaaattagttctaatttcatttgtgaaaatagtaaatttttttttgacatattattacttattaaaagttagatatttaaacaatttcaaataaaggggaaaaaatcaactcctttaacaagtttatggattcatccttgtttatgtcctctttgaaataggtgataaataaaagatatttagtaaaaaggaaataggaaagagatgagaaaaagagaaagagagattaataggaataggagataaatagtacattgaatttcataatttttaaaatcattttttatttaacttttttttttacaaaacaatccaactagtaatttgtatctgcccctcttctcccaatttatccttcacaaaataagcgcttttaatgtaaaagcttaaaataagggtttaaattaacaaagtaaaagttgtttgaaaattcttaatttttagtttgaattttttaacctatttaaaattaatttcttcactcaatgaatgatcagtgtgtctgtgtgtgaataatcaatggcacttacggtgttaaaaacttaaaggttagcttcgtgaagtcttttagtttgcgtggacaaattaatacacttgtttttttttccggctaattaataaacttgttaggttagataactataaaaacaaaacctgtttataagttttgtccttataaatatagactattagactgtatttaaataatcaagattttaagaaaaatgtacatgatttttttaaaataatcacgggatcacaaactaacttttcgtttattcaaaaaataaaaaataacttttaatcattgaccattcatttatatataattgttggaccaaaatttataactattgtttacaaattatatcttaaaaatcgaatttgaattcttagattgaaataatcctacatgaattgattgattcatgatttttttttttaaaaaaggagaattgattcatgctaattaatcgtatactgttatatatatatatatatatatatatatatatatatatattagtatattttataaatatatttaaaagttatatggatgaaatgagatagtgacggaccgatgaagaacggcttaaatttgtcgattccagaagaatttgggacccacgtcgacatcaaccggccggtccagcccaatgtagaaacgaagccggcccatgccacaagaacaaccgctgaggcaatatctaatgcctcgtttcttaataaacaaattaacccccccaaattattcatattgactggaccaataaaacgattaatagcctttttcttcttcttcttttgtttaaacagtattaatggcaacataactacagcattcagttttaaataactgttaatttcccccacaaaaaaattaactaaagtgcattaaaagtcagtgatatgtactttttagataatatttataagtttaattttgatttataggatttttatattatcatctaaatataagtaaaacaaactaacaaatgatagcaattattcaagagagaaaaaatattttgagtaatatttcttctaaattcatatataaaaaaaaagtaatttcgtatattggacttaaatataaataaatttaactattttttatatttaatgttattattattaaaataatatttcattaaattctaattataattctattttctatgattctgtattatttgttataataaatgttaataaaaataatttaatttttaacttaagattagtcaaattaaataattttatttttgtttatataaaatatgttacatataatcaatcgaattctccgtctggcatcataattatctttacatggtgatgtaaatagaattggatccgataaaaaaaagcattatgataatgaaacaggttggttgaaagttgaaacttttgcagaggcttatccatatcacaaacgccacacgtgatttcttccgtttggcgctagtgaaatgacgagcctaccaaacaagccccacattattacagttttgctcaaatccaaacaatcattttgtgggtcacatgagtgcaaaaatatatgtcaacaaaacaacgggtcctcacctttctccttttctatatttcactttacttttagtaattaaccaacaactaattagtatggtttaagaaagaaataaaatctgagaaatatacgggaatttttattttttttaaatatttctttttgccaaaaaaatcatcatgaggtgaaatgagaatttaatttaattttatcatttctttttttgcacatactaatatataatatatattttataaaaaaataattctcttaaatcaaataaaattattataagtaataatattctgtttcagatttgatttacagttcataaaattaaaccgtaaagccgtaaagaagtataatataagagtaaaatactttttaatgtttattgctacattctttaataaaaagtatttattgctatatgaaataaaatatatatacattcaataacataagtagattacacaattatgtcagtttattattgaaaaaaaaagtatttttgcttatgttggggattcttaaaatcgtgttttgctatatcggtgaaaataattttattatttttcttatttgactatcagcatgaagtctttgacacgacttattatgtaactatatttaaatattggaaaattttcttaacactctgcttgcacgttatgggcaatcggagactaccatccttgattctgaagatttgaactattccttcttgctcttgattttgactttgtaaaactaattgcggacaagttcatcggttatttttaaatagtaaagtaaagtcaaatgttactctcatgaaaactttaaattaattattaatctcccatgtttattaatatttgaataataaattaaaatgaaataataaattttattttatatatatatatatatatatatatatataaagagaattctataataagtactttttacagaaaaaatacataagtaactagagagattatatcacaacaaaaattatgatgaaaatttcatgtcaaaactattaggatatgtgtttacttaactttcatttgaacaacccaatgcgtgtttggaaaattttacattgatgcagtagttaagacaagtaattttgggaaatttttctttacgcttaactcaaaattgttattattaaactttcacttcgtcttaaaaattgagtatgagtttaaaagtcctggtgattggtgctcatatgcgcataataaaaaatttatcatattttttcatgctatggattctattattaatttttatattatatcttaaatatttttaaccaaatttaaaataaaaaataaatacttaattagaccttatacatttattctgttgattactatgataatactactgagtggaggtataaaattgatccaatagttgaagaaaaatgaaaagaaaatagaggaaagagagatagtacattcaaattctttcactaatattttcaataaaataagcattcaccaataaaaaataatagtactgcattcttttaaatatcatcacttattagtattctcatactaattgattacgaatatcttgaagtacagtgctaaaataataaaataaataatataatgattgaaataaaatatataatgtaaaaatatccaaaaaataaaaatagcacaaagaaataataaaattttatccaatgtaagtaaaggagaaagttaataaatattttaagaataaaataaaaataaaataaaataaaataaattataagctagaagttaatatctaaaaaaaaaatattacaaaatactaaaaaaaatgtttatcaaatatacttttgtctctaatataaaaaagttaaaaattaagtaaaatactcaccaaacatactctagaacaagagaaatattgttattacttatttttgttataatgtcaagtctaatttttaagaagagtatctattttattcgtaactgaaaattcaacacatggaggaataaaaaaaaaacatggtgagtaacaaataatctacacaatctaacaaggatattcatgacattcaaaacaccttttgcaatataacgtaagtctattgatattgatgacattgaaaacacctcttacagattcttcttcaaactttcctaaaatttattattatacagagtgagtcttatgcattaaaataaaataaaaatgggtatgaaactctaaaaaatatatatgtgatttaaaaaatatatacaatataattagacatgataacaaaatgaaattagaatgtatatggtttcttgttttcgtctcccaaaatccatcccaacctctattttcaatagagatgattttttatttaatgttctcatcgactattgaatatatttgttccttatttatattcgccctagaattttaaaaataaaataaaaaacataaaaaataatttaagaaagaaaaaataataacattttctataaaatagtgtcacccgtatatccaagaattttttttattactttattatatatatatatatatatatatatatgatctcaaatttctattcctattactaaatgaatttaagaatcaatcatcacctattaattattgtaataaaaatcttagaatgacatatttaattacaaagacaaacgataacaaatgttaattaagtaatatatattttacataaatgaaataatttatcacacaatatgaatacgggatattacatactcattatcgtttttcaaaaatcaaatattacctacatctgtatccatcccacaaagattctctggcaaactcagaacgagaataggatgatacccacagataccaatttatttgtcatgactaaatataatctataattctgcactatatatatatttttacataaatctttactatactttaaaaacattatattcacaaatatacacttacatcacatcaccactgtacaaaaaaattacatcactataaaaatactaaatctcatcataaattgtataattaaaatatccttatcgacatttacatgtatacctacaaatgaaatatttttaactattttcaacatcgtgtacagtaatggcatttacttacatctcatttataaatcatgctatatctttctttttgcttctaatcatgctatatatatttttttcccttctaatcatgctatatatatatattttatttttttttcttcttcttctaatatgctataacttagtaccactataccagcacgtttttttttattttattttatttatttttatatataagctattgagagtaaaacacttttttttttccaatttgaaatgagacggtgcatgaaaaggttgttgatgaatagaataatcaaaacaatcattttctttgtgaaattgtggcatctgaattttctggttcatttttatgcataacgtgcagttaacaaatcagaatcgttaaaataaaaaaaattaatagctcaaattctattataataaattaagtttaaaacatgaatttaagatatgaattttcttatttacatctgtcgatttagatttaatgattacattaatgcctaaataaacattgcacaaaattagttttttacgcttgtgcaaggcttgtatatcatctgaacggatcatcaaatttctttttgttattttgattttaaaaaaccatagttaaaaattaataattgttacttgaatatcaaataaaagaaaacatctctataattaattgttggcttattaaacaattatttgatattcaagtattgtttaacaagacagagtattgtttaataattttataaaataatcttttttttgttgtccatatataaatgaaaaatatataataaatattatattaaaaaattaaaataattattattttaatattctttttatatgacaattttaataagacaggtgaagtaacatctataaaatacttgtcatttttgtgtaaaaacaagcacctattatttttattgttggcgatatttttgtgaatgatgctttgtataaaatttcactttaaattcttttaattttttcttaatttttttatttataagaatatttatcttttgaataaataatatatgtataaataatgtaattttgtttataagatcatctaattataaactatcgttacttaaatttttttaaatatgtaagaattaaagataggtatgagaaaaattacaataatttacatatcttaatcaactaattgagctactcttaatatttatgcagagttatatgtttaatttttaattatttaataaatattgatataaataatagaatatgcaattatgcaaaatagaagtttcaagaataagacattatcttaaaaagtagaaatgtaaaaagtacatttaagtcatttaacatattaaacaaaataatcaattatgcagtttaattgattgactagacagtcatgaacttaataaacatcatgaatatcttctttaacgttctaattcttttaattttttaatatatgaaaaaggtgaaatttaaacgagtccccgaaaaatcaaaccacataaaaagccgagtgtatgtagcaaagcgaaagccacccaccagctcagatcagcctatttctccgttctgtttttacactctttccatgcaaaattcccccctaaatttctgggttttattcttgtccctctctttctagtccattcttttgttagaacactcttattacccatttcaggacttcacttttcctcatcattcctctctgtattttacatccatcttgaaggatctgtaattttcctgttttctttttcttttttccccattttcttggcacttttgttttcctgggtctcatattatctctctgtacctgaatattcaaccccctacccctctctcccccatttcacatttattaattgttttcattagactcacagaagagattttttgagctcaatacatcaaagtctcaagcttcctggggattcgtaaagggtctttaaaaaaaattccccttttgttatatgttttgaatccaacccttgtttcaccaaatcttgtttcacccattttgtttgcagcctctcctcacctaatctcaagcacccaggtccacaaaatggaccatttcacggtttcagactagtgggtaagttttcttatttgacaaggtctttccttttccaattcaaaagacaaccttgtctgaaaaccgaagccacgccaaaccccctttcgttgtggctatcttccattcgttcttgatctgacacaagaaaaaatgtatggaaccaaaagcaaaatagaccttgcctttgaataccaatcccaagttgcagttttgaggcccagtatccattccagaagagcaaatctgactgtgaaattccaagacctttatgggttcacagtggaagggaatgtggatgatgtgaatgtgttgaatgaggtaagggagaaggtgaggcaacagggaagggtttggtgggcattggaggccagcaaaggggcaaattggtatttgcacacaaccatagggcaaggcagtgccctcacatcttcattgaaattctcagcactggctaatgcaataactttgaagaagttgataaggaaggggatacccccagttcttaggcctaagatttggttttccttgtcaggggcagccaagaaaaagtccaccgtgcctgacagttattatgatgatttgaccaaagcagtggacgggaaggtcacccctgctacccggcagatagatcatgtgagcaactcacccccttttttttttcatgatcatcacacattgggtttgcttttgaatttgattacaattttcataattgtggttgtgggcatcaccctttatttgactagtgcttgcaggtgtgtggatcattttcaaatgaatttgatgcaggaattactttgtctagactttacattgtgtgacctgtgaaaagattttcagacaaaattttgctgcagattttgatggatgattgtgggtgttttcttttttgtttttcttcgaatgagcaatacttattatttatgaatgattcggagagttaaggaagatctaagagttgaagcattttttatccctgtgtttgtaacctttacaatcataagttctgttagccatattaacgtatcccatttaaataatttatttgttcttgattgcatggaatttaggttaggcaaaacgaatctttgagtaaatgctgattagaaagaaattgtaaattggggtggtatttgatacggtttgacatcagggtgtttgatgtgatccttaaaatggtgattggttttttatttttgttcgagaataatttgaacttgtctacatgttacattgttcattatatatatttattttgcttctaatcattctataagcatttttgcaggatctacccagaaccttccctggtcacccatggctggacactcccgagggacatgctgctctcaggcgtgttcttgttgcctattctttccgtgattctgatgttgggtattgtcaggtgggtttgctctggcctttcatttgtagttttgactccctgctcagtacatgaaagacaatgttctgatttgttattaaattgaaatttgatactacctatgtcttgtattaggtattaggtattaggtatttgaagggaaaatatcttgtgtcttttttttgagacgatgtggcttactctttgattcaatcaactctgcttctattctttttcttctgcaattagatattctgtcttctattagtaacatgcaggcctctgaatgcttcctttctaactaattaacaacatggtgtgactaaagcggggattagtttttatgttgtacctacattttgtttttctcaattgcttcagccactatatttgatgttttaaattttttaaggcaggtaaaatatagcgccacaaagtttgacaataatatgtggtttacttgaaaattaaaaaaattaaatgcatacttgggaacatattttcttaaatattgactctactataatattgctccagggattaaattacgttgcagcattgttgttgcttgtcatgaagacagaagaagatgcattttggatgcttgctgtcttgttggaaaacgtcctggttaacgactgttacacaaacaatttgtctggatgccacgtggaacaaagagtgtttaaagatttacttgctaaaaagtgtccaaggtaattttatttgatgtgttaactgtgtatcatatgtttgtttcttagtatcttctgaaaattgtagaaatggaaattcaggattgctactcatttggaagctttggaatttgatgtttcccttgttaccactgagtggttcctttgcctcttttcgaaaagcctgccttctgaggttagagtagtgctggaataaattattcattgaaaagctaaattgttccacatactaatacttcttccatgaatcagacaactcttcgcgtgtgggatgttatcttctatgagggtgctaaggttatatttaacgtggccttggcaatctttaaggtaccactagtgtagcctttttgatctttcttgttttttgataaacacacaaaatatagaaagagtttgctacattggaagggatgtttcaacaattgtcgccccaattgcagatgaaggaagatgaattagttataacccatcacgttggcgaagtaatcaatattctgcagattaccactcatcacctatttgatccagatgatctattgacagtaagacaactttcactatttcatatctttgtcatttgcactatcatcctttccatgttgtcacaagaagttttgatgcatttgttgaattaaactttccttgtgtttgcaggtggcatttgataagataggttccatgacaacaaataccatatcaaagcaaaggaagaagcaagagcctgaagtgatgaaggagctggatcagaggatcagacggctaaattcccttagaatggaggacaaatagcattttgctcttttgtccttttttttacttttttttttttggtggtgggggggtggtacgttgctctctctaaatgtcgtcctctgctgcctcgagcagaatgcagaatttatgcattaccttaaattcttatctccctcggggcaggatgtttgtaggtcataaagtgtaaatttggatatggacacatcataaacttattaatttaatgttataatgtgtatcaacatcaaaattcactgctgtggtacttcaatgcccaactcatttttagcctgttcaattacattctcttgcttagtgcctttggaccatgaatttttgaagttctggcaaaactcataattttaattgtttaattattaaaattaagaatgccaagtgcttgtaaaattttgaaacatcaactaatggataatggacttaatattggtaattggttggttgcaagtcgccacttacgtgctttattcaataggtattcttgattcaagggattagtttaattggaatgtttggttaaagatgaaagggaaacatcaacttaaatgcattttcttacacaggaatcatttgcatttgccatttggtaagttcaatgacaagaagaagatcataacgaatatcaaatcgctattgctttaccaaggctgaataggaaattaatgaaatatcaaaatgacgtattacggtgtgtatgaataaatgcgatcacgtggtgtatggttggttgagcatagaaggaaaattgaaaatgttgtgatgggttcatgagttgtaagcggtgaggcggaataactaatttcaaagtatttttaactgataatttttaactaataaatttttagttggattgaagcttgggatgagcaaaaccctgctagagtcactggccaatatcaaagcatgagtcagttttggttttggtttattgcataacagccacaaaacttggaagtgatgacctatttatatatcactatatttattcctagtatttattttcaacatatatagcttaaaaatttgtggcattgttagttgtaattctatttatattgttgatattaatagaattgctatctagccaaagttacagcttggtgtaagcctaatcccccaaccaaaccagcgcaaaggtcaatgataataattttaactaataattctttcttcttttgtatcttgaaatttgaattgtgtattagagtttttaaaattatgttttaacttttattttgctgtttaacgcgtcatgacagctgagctggatttcaaggcggtgccattgcgtccttctttcactagtcatgtactcatgttctggtgcaattcctcccccgcacccccctctcttttttctttcttttttttttttttttttttttttttttttttttactttggggcaatcaaattgcctacttcaaagatgctatgattttttaaattcttgtcttaattatcataacaagtaatgctaaccagtatttcaagtttcaataacaaaaaaaaaaaaaacctacttcaataatgctctggttaaagaatgaaaaatgaatcttttattaaaaaaattataatatttaatattaccaacatattaatattatgatttctaataaaacctttttattcattaatttcttaaccaatatatttaaaatattcactagcatgatcataataataataaaaaaaatcatatagtggacttaattactacttttcatctaacgacaacgttgattacaatgatatgaaatgagtttagatgatgacattaatttctgagtgtagtttgctatatatatatatatgttaatttgttatttttttgtttatacgtgagtttccaattattttgttatcagttcttgaaacgtgaatttgtatgttgatgtgtttggaccaaccatctacatcggttcagtacttctgctcaataatgacggacgaagaaagttgcaaagatcaacaaaagggtaaaatatttgtatttttataataatattagataattactgttacagatatatgaagcaagtacaactcttttgacttatttgaatttttatatttttaaatattaaacaccttattaataacattaatttttcttatctttctcttcttatcatattatattatttatgatatcaatatttctctttcttctctctatttctctcaaactgtcaattgattttggatgtttaaagacttttttcctatatgatacttgttcgacatgtgtcaacatttctcatcaacagtgtgtttggaatggttgtaagatgaatcaaaatcaattttgatttgactataaatatgaagcaacaaattgttgctttggaaaaatcttgttttcaggtagttttgagataatcactgtgattttaaaaatatccaaaaacatattatataggagatgtcaatcaaatgatttaagtgaaatggatgaaatgaataactacttgagaagttatctttaataaaaaggtgttacccgaaagaaattgtaatacacaggtcaattttaggcaataaaaagtcgggatagcacttattacataaagaacactagaaacttgccttaattatttgaatgtgtgaataagacttgtaaaagttctaatgaggaaagtaaatcaaatgaaggatagtcgaatcactaaagatgagatcaagaaaaatgataaaataaaacaattcaaagatgtggtcaataatttgtttataaacatgattaacaaaacattacgctacatagttaactccaactagcaagaaaatgctttgctattgttgttgcgttgttttatgcgagtggatgtataattttactattctgctggctatactgacaaccaagttaagaaaagaaaccaagaataaatctgcatttcgaggaaaacaaaaaagttggcatgaagatctccaattgccatagcatcaactacatgtattatacttcaacccgtatctgtatgcacgcattaataataatcttaacaatcagacggaaaataaaacgatgtcttcctcccatattattattgggaaattttgcatgcaattttcatcaaagaatatgcctaagtacaaaaaaattctaaagaatttacaagatccttctattatctgtggtttctcgtaacaataagctttctttcggactgggaaccaagaggttgacatcttccttttgccctataaacaaaaatgtgttttcccccgctcattctccattgagtatggtttgcttcaaccttactaacttaaagaagagctagcattctccgaagttgtatcatcaattgctaaattggatacctcgccaactacatctgtatcgctttcaccatctactgaagctttaggcgatgcttcaggggtgatgttttcttcaggtttcttcaggctccaatacatgatgctagcagttaaaatgagtatcatcttctggttgacctgttaaggttaaatgcataataagctaagagtcacacaaaatttctcagccaaataaatgcaagattagtgaagtatgtgggcaggaagctcaatgaacaaatatatttagataatagaagaaaaatgcttttccatgtacattatttatgtttaataaatgacaaactctccgttatatccaccagatcaattgttaaaacgtaccattccaattttaagatttcagaaacatcatcaatttctaatcctataaaagcatatctattggaaacaaacttcaaccaattaagtccatactccccttttcatagacaattggcataattaccaacaaaattatgtttaacatcgacaaacatacctcaattatgtcctcaggtaacaggaaaatggaacaccctagttttcgggcaacactgattatgtatgttgcattcaacttcttatcctcatctgcaattcatatgacataaatttgaccatttcaattgttgctcataagataacatattctcatcatattaatgtcaattgtcaaatataataatgcgtaatgtgaaattaaagagttgcaagcagaattctagccagcacaatttctcaatagaatgacagagttgacataccagtctcccctttagtaacaagactccagttgacaacccttggctccactgcactcaaaagctcaaggaagaaaacgccaccagaaagattcttatcctgatgaagcacaatacataaatatcaacaatgagttgtagtcatcaaagcaatcatcatgagcactgaaaagtccttttcttcattcaaaagcctaaataaaattacttttagtactattgataacagatgcctgtgatttttctcccaatatgagcagtacaaatatttaagactgataactgttataaataaatgtaaaattaagagtagcaagaactatataagcacacacgcacacacacataactctcaataggtggtttgataccttgaaactatccatttgagaagttcttcctgctcttttcactttattgtttgcccagtttagaatatcagcatcagtaatctctttaccttgtgagtgcgatctcaaatttctcagaagttgaagcatagtaaacctcatcagctgccacaaaaatgctgaggacagagaaaaaacagagatgaatatttcctacatataatggggcatatttttaacaaaataatgacaaataaaaatgttagaatataagagaaatatccaataatatatgtttttgcttttagtcataattttttttctatcgtgttggtccctcattcatctaccaccaaccctaattaacttgggttaaaggtgttgttgatgttgatgttgatgttgatgtgttggtccctcattattctagagtgtgtagttttagtccccaacttaagtgaatcaactatcaagatgatgtggctaacagtgagccaagccataattgccacatggctttattttatccaatatccattgtgttgccacatggctttattttatccaactgcccatcctccatattttacacttcatcttccaattttttttcaactatttcgttcattgaaggatcagaaataaatgttgaatcctatcaatctgataagataatcgatcttcctattggggtggggagaaaggagagacactgagacagtcttgaagaaagttcagatcttgtcctccttttcgaacttgaaattggtggcgtccaccacaaaaaatgaaatggcacccttcttgctgacctcgaagtagaagtttggtggagttaagacttaggttggaactgcattccatacagtaaaaaaaggaggccattgttgtgaagatttctttaagaggactgtttttcatacattgacaagtgagggatttgttcaaagttcacatgcgaagggcaagagggtgggatggagaggcgtggcacaataaaactgatgatgcatcttctatagccacacgagacaaatatatcaatcaacatttaacagaccccaattgatgtcgaggaccaaatgtcatcagtttggaacattgggggaccaaagaaatatgaaaatttgtattattgggaccaaaaaaaaacttgcaaaaatattgaactaaaaacatatttaaaaacctattttcactgtatatctgagtaatttagagtcttagattatctcaattctcaacatttccctatttccttatatttcaagatttgtttccttgtttaattaggaccatgatcattgtattactattttttttttgctgaaagcaaggtatctctatagtcgaaagccatgagactaatcctcagtagcatccagtcattctattattataaataagggttagagctttatgttttgtaccacatatattatatatcttgatttgtataacatgaatatgcaccacagagaatattctgatattcctcggtaataaatctcaagaacatatcctggctattgattatcttcagatggcagatttaactatagtgtagaagcataaaataatgtgttgacccatcaaaatatccaatgaatgaggacaaaacagaatttaaagcagatgttaaatgagagggtaccaaccacacaatcataacaaatttctagcactaacaaatcatcacaaagcagggaaaaaatgaaactcacccaataagagcttcttattcccttgtacaatatcattaccagcaacattcactaatgaaaagtttagttccttcccaatctttataacttggttgcagttctcaactttccgaaatggcatctttataggaggctttgtggccagcttccaattgacagatccaggtgaaaccttgtcaagaacttctaatagaacccatctgcggtaaaggaaaatcataaccagtagttaagatcaaggaaaatttcaaaagaagatgtaacttaaaaacaaaaatgataagaaaatggaagacacagatgatgagccaactgaacagtggaaaacttacccatttctgacatcctcaaaaacattattgacataagtggcaattccaagactgttaatccatagtctaaagcatcgttcttcccgagatgtctctgcatcatcagtcatcatctcagcaaaggacattttctggctgtcaactgttgtaaggccattcctacaaaagtacaagtaacagagatttttggatatatataaatgaaactcacaatctaaatcagctcaagatccaccctgtactgtatacatttctaacttaataactttcactaaccctacttacttgtacctaacaaatgaatcaaaccagtgagatccattacttattagtcattactcagaggcctatttaaggataatcataacaaataaaatgcataagcttaagtggcaatgttatatgatataggagccacacctatccaaattcatagaagggcagaaaacagcatgggttcttggaagcatatcccaaaagattcttattgttatattgtatgaatttacaatgaaataattagcacatttgcaatcccttaaaaagaaccatacctatgctggaaaatttgagcaacaaatgcaagattaagattaggtgacccctccactatgtcctttggagtaaggtatctcttgcaatctaatttctctgcctgctcaagaaccatgtttgccctttctgttggatcacttgtggttagggcagatggacctgccacttctggggcaagagcattaagcaagtaagcataagcctctccatcctgcgaaaagaagattattgtagatataatagactcatgcaacttagaattatactatatctcttaacaaatgccatgcacataaaaaactagccacacaacttatttttttttttgatcggccaatgttagttgttaaatgttagtttttttgttagtggagggattcgaacccacgacctctccctccttcccttccttcccttcttttccttttaccacccaaccaacctttttgttagtggagggattcgaatacacaatgattcagcaattggcatgatgtagggaaatatagtgaatcttttcctttgaaacttgtagatggttgtcaaggccagcagaatataacaagaagatccacagtttctttactgatttaaaaggcacaaaaatcaaggcagtggtgtgtataataaaaggttgttaataaggaatactggataatatttcatccatgtccagaattatttctattagagtaagtcagcatacaaagttagtaagaatttccctcacctttaggtcagaagagaagtttgtaacttgtttctcatatccagctttcttcaagtggaaattcatccatttcagtaagagcttatcaggtgctaaactgataagctcctccacatcctgccagcatgttaaatataatatagaggtttatttcaatcacgtttctgacatatgtaaaggaaagaaaaccattgtacatgtaaattacaaataagaggaataatattatccaatatcaccttgtcatcttccactaattccacaagttgaggagttttcttcagattgagatcagctaacaattgaatctaatgttgccaccataataaaaagttaaacaaacaaaaaagacagcaaaagtttacatgtcttaccaatgaaaatggtgtcaacttcctcatctgagttccatattaagcaagaaaagggggggaagtttccgtagtttaccttgattacttgcgaaatcaaaccaagtaccagatggggctacaaataaccaaacaggaaaattttcaaaaatgagttaaagtcggtcaaataaaaaaaaaaaaaaggaaactggaaacatggagaggggaaaaacaaggattgaacctactcttccttcaattaaatcctgtgtaccaatattaaccaccgtgcacccaatagccttggccgaattgaggccaagggtatggttctcattcctttcccatggattaagaaccttttttgtgttaatagctcgatcatctatggtcccaggaacagcaatattaataagcttgctgcagcaataaaataaacaacaaagtcagggaggaaaaaggggagacaatattttttaattagctgatattgagtcctgaacatctaccaaagaaggactccatcttttgcaagatcaaacaatgcatttgttgatggatcaattggaagaaactgactcatgaatttatcttcagccaagtagttgttaatatgtgcaacataagaagctttctcagattcattaattgcatgatgaacagttgttgtagctgccttcaggaatgaagaagaactttttgaaccaccatctttagctattgctcgggattgaagattcaaatgtgcctgccatccaatgtcactgaataagttgctaggtccaatataaatataattaatacctacaaaagtactcacaaatcgcggtttcatgttaggtgcatatatatgtgaagagtccaggcaatatgaacatcaaatgacattgtagtgtatattttccaataatttctttgagaaagcaataaacagaccattctaaatacatacagtaaaagttaaattaagaaacacatgaacacataggaggaattcagaaaccatgccttaacttctcagggggtaaaataaaaataaaaaaacaaaaactcaccctaaggaaggactcaaaatcaatctcttcatccatgttctgatatgactctgccaaggcatccttaatctcatcctcggtgaacagttcagagaaacccttcaatttcttaaaaataggtggcaaatttccgacagtaacacgtcccgattgagtcctttccgacacatactagaaagaacgtaacaaacatacacaatgcgtgttctgagtccgagattgtggtgtcgaagagaaaaaaaaaacatcagaagagaggaagaaagaaacataccttggatttgagggttcgaagttcgacttgggtgaactggctctgaagccattgatcagaaacaaggacaccgacgaaactagacatgttcgactcggttggagaaaaacaacaaacactcggaacaacacacggaaatcaaatgtttataagccaatagagataacacatttgttttgaaatcaaatcaacgatgcgtgaatatttaaattacaccgatccaacagtagattgcgacaaggctggcacgaagcgattgagaaaggagtattgagaaaacgtccctaagaaagtcagaaaaggagagcgagatcaaaaggattcgtcattgtatttgcgtggagcttcttcttcttcttcagagagagagagagagagagagagagaggcttgtgttatttgattgtgcgaaagaggaaatggggtggagagaaaaaaacgaaaggacccgcgaagaaagggaatgcaacgcaaatactatcgaatcaaacggtaccaatacaatgcttttctttctttcactcgttagactctctaatgatacttttaagttatttctataaattttgtttttttttagttatgaagttaatttttcattaagacttagtcaaagttcataatctctatataaaagtgtattttatgaaaatcaaattcaaattttttcttataaatttatcgtatattatcaattaagatacatcaattaaatttttgttctatgctattgcaagtgccaattgctaattgctaaatgatatatatatatatatatatatatatatatatatatatatatattaaacaagaatgacatgtggcatcaattcagaatccccacactcctctttccttcgctttcgtattgtttttatctattttgttgctttttcacaagccaaaaaatatctcatcgccttctacaattttttcgtcgttattatataaaattatatatatgtaatgttcttgatctcgtgctatattttaccataaagtaaggttcggttcaagggcaatccaatgaattcatttaaaaaaaattccgaactcagactcagtaacgacatttatttccgctttcctttatatacatccatacctaaccttcgcacgtttatctttaagatgaagatatttaagtatctgtttatccaaaaacaataaaaagaaagttcattttcatcgcaatcaaaccaaatacaagatttaaagaaaataacaattttaattcttatctaagaaaatcctattaatcttcttatttattagataaaaaactattgaatactttctaagttttcaagatattaaatacatttattttttatttcatataatttataaaataataagaatttttatatggaagatttgcaagacaatgtcacattaaattataagttattatgcatgtattattaattaataatctagttaattagtgttcttataatattggtggaattaaaaggaaaaaacatttagtataaaaattatagtaaaacacaaaaatattatgaataacataattttttattttttaataaaaatatttttactttatgttcattaatggtatgtttttatataaatgtgaaccatcatttccaaaactttcttatttttaaatgtcatgttgaatatgaagcatgttatacttagacgacgaagatagttaaaaagttaaaattgcacacaaatagaacggtgtgcatcataaaaaggaaggtcaactcttttctaaatgaaatatagccaacctcgtgagagctctaggtccattcatgtatggtccaatcccttaactatcacatgcaaccgctttgacatttactctagttgacctttaatatctatctaactgacattaaaaacaccttttattttcaaatgttacttcaatgttaagtttttcacacgaagttgtacaagtatttaacttctttactagtcacttatactattaatttgtctaatatataagatggattagatgcttgggatgacactgaacgaaattgaattctgattaatgttagccaagatggacttttgagtggactacaatttgagattttaagcgatgtgtcttctagcatggacgagatttttagtgaaaaatggtaggttcctgcaaaaagatattacaacagttaagttataaaggttcctccaaagagacacaatatgtattaaatatttagttgttaagaatataaggacatatccaaatcacacatatatgatttctcatcatgcacacgtttaagacaaatctcatcaatggttagttgcaagaaagcattgagaacagagtacattactcaatctcatgaataaaactttcattaaatgaacaacagttcaattacaaagtaagatttaatatttttggtccttaaacttttaaaaaaaattgtttttaagtctctaaacatttttttaataatatttttggtctctatattttttctctaataacatatttagtcccttcttgtgattttgctagtagtctagtgtctcccacacaggctagcatcagggaccctggaacgctatcgatgttcaacatttttttgcaattagagttcgaggagttggtcaagcgtctaggatgttaactggcatttgggaattgatatactagtgaatagtgatgctagaacagtgcatcgtttaaccttttcagcatttttaaacaccaaaaatttgttttcttacacgattaaagttgaaaacattattagaaattcttgattccaaaacaaagacaatgtattgttatttttatacaaaagttaacaaaactacttaaaactcaatatttacaaaaaaaaattttggtgcaaactcaaattctactagtttctatctatttttctaagatttcaatatttattttgcttttttctcttatttttttccttcaaaatcatgcacataaatttatcggctatatttataaaaatacttcctaacaaatcaaatagggacttattaacaaaacaaaagcaaaccataacagataaaataaatctcaacaaaaagaaagcagacttaatttttttaaaatatattgataaaaaagccatcatggtttaggttatgttgagttgaaaggagagaaatagtgtagatagaaataaaaaagaaaagtaaaaatatgtaagaaataaagttgtttgattaaaaagaaatatgaaagagataaagagatgagtaaaaataggtaaaataataataaaaatgaatctcattatttttaaaattatttctcactttatagtccctatcaaaccaaaaacactaatttctcaaaattgtttcattgttggaaatggacaccacattaatacttgaaatcctattcatgatttgaaggacataataataactttgtttatttttttatcaataaatattaatttgttagttttttcaaaaatgtcagtttgaggattcgaatccgagatatgtccccccttccttcattattcttcaaccgttggactaaccttatatattcttaacttagtttttttttttttttttttatttacaaactaatcaaacaaggagttgttcatttttttttgtaatcatgataattagaaaaaaaaatcattttgttagaatccccaggcatttcacaaactttgagattttgagtatgatataagactaattttcgatccgagacttaattacaagctcatcatcactccttcccaaaaaagtattatgtggaaattgatccatgatcttccccactaaactataccaatttgataataatcttgtttattattattttttaattacaaaaatgtcactttcatttgaataaattttattattttccctaggtccgatccctctgaaacaaatacttctgaaataatcttgtttttactttactcagcttctggcctggagtccaactggaacagtaaaggtccaaactccaaaccccatttgcatttgactgatagatgcatccagttctccaaaaagaataaaacagtgagcattagcaagcaaagaaaagatgggaggagaccggaagaccaactttggctaattttataggcatccataataaccctttaatattaatgctttgatgcagtggcgtttgtgcaaccctcttaagagttaaggcatacgtaaagagcaaaggaatatatacacttcaaaattaactcagcaaaaagccagatttaattccatctcaagaagcgtatcattgaaaaaagctcaacgcataacataaagctatagcctttcatgaatcatgatcaaccttaattaccataatgctatagattttaatgatcaatcttagataccataaaaaccttaatatacacttctgtctccactataactgttattggaattgtgcctgcctgagtgaaactgtactgattaggtgaaacaaagtcgtctagctcatacttgaaccaattttcaattatctttgtagttattttgaaaacgacattgcaaagatttgttggccaaaattactttagcaactcacaattatcaacatttctttttcgtcgaggaagtatcaatcaaatacagtaggctttataaacccaacagagcaaggtagcattggaaattgacttcaagacttcaacaccgtgcgagttttacttacaaggaccaaaaaactttttgtaaatattagagtttgaattatgaaatcgctaggcacccaaaaagctgtcaaagacccaaaaaaaaaatgttaataatacttacaagatctggattgaaaaaaatatatccttgattatttttttttcaaaacggcatctcctttcacatgccactaggataggaaaaataccgggtcttcaggagctggaacgttaaaaggtccaatataaaatcagcatctttaatttaatttcagctaccgtaaaaagagcttgtaaatcatttgatttccggaaacatccctttagagaataaaatcaactttcggaatagactttaactttaagtgacggcattaaaactctcaaaaaaaggtagataaagtcataacatgacaaccacataacatgacatccgcatgctatgagatttaacaaaaaaatagtataatagaagaaatcacattcatacatacattgaataacacttatgttcaaaaaaatggattcaaatcaaagcaagtggcaccaaatgtagatacataaacataatctaaattaaatattcaattggaagagtgccatcagaagagcaccagcacaccaaaagttgccaagacaaggttggcccagattccatagctgatgagcttgtgagaaggggagccatcatgagtggatgatggagatgatgctttgctatctgcactgtgttcagttggagaatcagcagcaggggcaatatcaggagttggtgcaggagcaggtgcaggaggaatatcagtgccaaaaatggcctcagggagtagcaccttgtcaacttgatatattgcaacaggatctgtggcatgaacagcactgctcaccctggtcttggaccatcctgaactaatgtgcaccgtcccagaattatcagtgaaattcaaagtgtaatcccctccggcaaatgtgggagtagagctggtttggctaaggcttgtgaactccgccagagaatagaaatgtggcaaggcatggaagaggatcacttgctttagctggttagaggtgaggttggatagggtagttttctttacagcattgaatgcactgtccttaggaacaaagatggtaattccttcttcagtgttgttggcttggttttggaaagtgtcaatcactttagtggactcaaggtatccaaggaaggtgtgaaatggaccagcaacactgagtaactcagttaggttcacgaagtccggtgccggggctggtgctggagttgggctcagagagggaggactagcagttttggcaaatgctgaactgaaaagcagcataatgttgctaacaatgaaaatcatagaaaactccatatcttccttggccactggtttatcctaccttgctatatcaacagtctctccaaattcctgtatgaaaagagctccacagtggttagatctcatcataacaaaacctaccaacctgtgaaaaagttaaataatgcgggaataaaaaatgaactcccagttcaaactcaatctccaataaataaaaaatcataaacccctcaattttttttttttacctaaccttctttacatctcagtaaaaagttgtcaacatcttactaataatagactaacataatggctggaaccagatcttacaaaagttaacatagaggaacaaaagaaaaataataagatattcaacagaatatgaaatgcacaaggtaagatctatgaatgcgaattgaaccagagcaagcagaaggaaatgcagatccgagtatgatatgaacactataacaatttgatagaagcgaataacacttaaaatgtactacttttgcttcacactactgaaaaatgttaaattcagaactcccagaagactaaatttccaaatgctaaattcgagatcagacagacacctaatgaaatgaatgttgaaagattttctattttcttttttgaaactatcaatcatccccccccccccaaccagtgccaatggaatgaatccattactagttcattttcctcacaaagtttctaacttgttgtcaaacccaagccaaacgtaggtgagttagacttagaccagtcaagtacacagtgacagaattcacataatttcatgaaccccataatgaaatgagacagatctagactagctgatccaaaatcacaagcacccatgagacaaaaatgacattcaaatgtgaaaaggcaagaaaagctaaaagtttgcacctaaccataaattgagtgacattcagaacaaaagtaaattaaaggaaaggaaagatattgagatagaagagcacacagacatgaataagaggaattcagagagagagaaggagaatgtgaaggacgaggaatgagaatggaaggagggtatataaagatagaatggagggtacgtataccagctggaagggtattagtattggctacagctacagcaaagagatgcttctaacttgagggtggttctttggtgaagacatattatactttaatggaaaatgcttctctggaacacacttttttctctccttgtatggtggcctttccatatccgctttaactaaattacttctttaacccatcatagaccaaccttgcactctaccccaccattttccatctccccattttatcatctagctaaccgacatacataaatggtttctacttcatttctagtttatttattttcatcaccaaaaatgaagctgacgtttagccctccataccaatgcggcaatgctaatatccgaccatgctgttcacatgccccaaaacctacaatggaaaagtattttttttctaaattaaattatcgtttaattcttgaaattgtgtaactctatgtcgttaacttttttaacgttaaaagattaatttgatattaatttatattttttaagaatcaatttaacattaaattatataataatacataattattatattttttacatatttaatttattcttttgaaaactaaattgtcattaatttatatatctagggagcaaaataatcatttacctttgatatgaactattaagtgcacatgactacaatcaaagatgtggtgactagcatgaaataaaataaacttgttttctctatataaaaaatgcacggagcttccataactatatgaaaaatgaatgtgagatcaagttttttgataatctcttccttgcatttctctttaactctttaagtcctcaaactatattgtttcacaataattaattttttttgtgtcaccatggaacacatgaattaactggtgaggtttgtttcaatttaataaaaaacctcaagttaaagttttaaatatgaaattacggaagagttttgtcatttataatgatattattcaactcaaataaaattactttttgtaagatatatgtgatgtaggaaaaaaattgtgttaagtttaactaactaaattttgttccataatattaaattaaaacttattatgcttatggttaaagttcattactcataatttccgtataccatatgtatataattacggacattatggatgctgggcaaaatcatattgaataatcttttgtaggttgtcaattcaagacttgtaataggcttagtgctcaagatttattaaattgattgattaggcttgtgtaaccatcaaggcatatataggaccacgttttgattttccaagacactaacctgtctagaaaatcatcattagatgcaattctaacggactgtagcaatgtttccctataaaaaaatggactgtaataatgttagaaaaaattatgtattcaagtttaatcagcaaatgtaacaaaagtggttagaaaacggtaactaccgatggataaggcgagtactgctagcctaaaaaataagacatcggtcataagagaccaacattatggtgttaaaacgagttaaatccaataatttgacttatataataagttcaaataggttgagttcgactgggattttcgtaactcgtataacccaacccatttaatccatcaatcttttaaattacatttaacatttatatttttttatgattattggttaattatttatttgatttactagtttaataacatgtttttttaattatatttgaaaatcaaatttggaaaaaagttaagacaaataaaataatttatttatttaattttattttttaaaagagttgatggtccaacctaacccatcaagaaaaacttaatacaattttggtcttcttacttagtttcaatttctcgttttttacatcttgcgccctcataattttaagtattcccaaattacccttcttttttctcttaaaccttatttcctgcacattcgactttaaacccccattatatctcacccttcattcccttcttgtgtcttcctccttcttgtacttttttttatcagatctaatttgcggatttgttaatctgtaatataactttttttctcttatgaatttgcttatccggaattttagtagcccaataaaatagattatttttccatttttcattggttgaaaagcccggcccacatacttcaaattacattcaaaactcaagcaaccggactagcacaaagattattgtgtcccaaatttagattggcaaaagtaatgcagctaagaagagatataaaaactaaagaagttgacaactagggaacttttattgggaaagttacaaaagagtcctctttgcctctgtctattttagtcaataccaaaaaaaaaaaattttagtacaaacatgaatttagtacctaacatatatctgaatttctcaagtcaatacaatagaaatttgacaaaatgaataagaattactattgcagatgcaaattgggtatattgccatcttcgttcaagcccattccttcctaatatcaaaagtatagttaatctccaagtagcatttgttgtcatcatcaagaaactgcaaaaagaaaaaatatgatagtatatggttgtatcattaattcattatcatacaacaatagaagaaaatacaaatgttattctatcccatagtatgcagtgaagcaccgcttcaaattttactactatgatgatatgcaatatatactattaagaacaacacaagaagttggtgaccaacaaacctcgattccactactgaccgtaatccatttacaaggaaactaacaccagaatatattaaattaaagccagacaatatggtacttctaataaagaaacattacaaaaaatgaggaaataatgaaagaagtaaatggaaaattatggaagtgataaactgaaatgacaaaaccatgataaacttcgaataaaatgattgagaaccctttgaatcaagtatagtagtgattaaagggacgaatgaataataggtagccccacaccccaggcagatagtgagccgtcgtgactattttatgcaacatttaagaggaatatatataatccaattatgaacctgtgtgtgtgagtgcatgtgtatatttgtacaatcaagttcaacgtatttagaagtaatattacctttgatcttgcagaatatgatcctcttgcaaatagcccagagggagtggtttcttctggcatctcatgtgtgtaaggctctgcctgagggctgaaagttcctagcatctcttttgagctatccactgaaattagaattgttgtaagagagtgcttgatcaagtttttcatgtttataagtttaattaatttgaaatagatttggcacaaaaaaaaaaacttacctttgacaccagtcttccaaacagtattggtgtatttcaagccagacacaatattattgctcacatggaaggtgaatttcaagcggtaatgactaccttctttaagagtaaaccataaaccctttggattcccattttcaggaatggaaagaacaatgtcatctctatcaggagagatgatagacaaacaagtaatattcacttcagggtccagaatttctggaaataaaaagattaacgtaataattgatacaggtttagaaaaaaagaacatataaaagaaataaaagaaatcttctgattattgttcacaaaacaaaaatcccaactactagttttgaagttttaatggattatagtgaatattatgatttctcaaactgttaattacatgaacagaaaatgccaatttgcatgttcctcatgttaatcttcctgtagttgcataagtcaacacttacatttattattattattattattattattattaattaaacagtaataactaataacatagccttatattaattttagaaataaaatataatgtaaatttgaatattataagctttcatgcttgcgcaatagtccgaccaacttgaacagaataagtcaaatgtctaatgtgttctgattcttctgaatacaataaaaaaagaatgcttataattaagggaaaaattaattaagtgatatataaacctgcagcattgttcacatccacacttccaaggagttgttccttccatcttcttaaactctcatcatcctatattaatcccaaaattcaaccaaaaaaagaaatggaaagaaaattaatcaataaggaatgaagcatgaaacatgacctgacgataaatttcagcagacacagagaaacaaaccttatctttctcaaggtgctctttaagagtgcactgaggacccaattgtaatttggatccaacttcatcctcctcatcttcagttgcatagatagaggactcactcacgtgcctgctcaagggctcgccttcacttttataatgttcttcatttgcatgatcacttttctctccagtttctttgttttcatcgaaccccatcttcttggaacttgaaacagctccaacagggaaggtggttaactcatcaaccgtcacagggaacaacaataatatgaccaaaaaatcccaacaaacaaacaaatggaatataattaagcaacgaagactaagtaaggcaacaatgggtaaaaataatgttttgaagggattagtgaaactgaaaaaaaaaacaataatagtttgtgtctcacaaaacctaacaacgaccaataaccagaagcaaaaaaaggcaagggatgtcaaaggaaaaatggcttgtttgtcttgttggcaatgttttaggaagagacataaatttatggctaattttcggaaatggtcatgtggtgatccgaaatctttgtaaatgttactgacatcatgacatggttatatatattgactcatctgataaggagaccaaaaatgttttggtgaattttcatttcaattttgtaaattttaggattaaaaaattatatatcttactatttactgacaaataagcatcactttgaaaatataatctttttaactaagatgatatacatgagtcaatgaaaaatacagtaaaaaaaatgctcttaaaatatttttgtaaatcttctttttatctttttatttttatcgaaatcacttgtgttgctatttattgtatgttaagagtatatttttattcaaataatatataaaataaatattaagagagaaaaatcatgatcaaacatttattttttattttcaagtctatttttcttatatgaaaaatataaattcaaaaataatataaaaataataaacaggaatatataatactatgtaattaattgttaaaaaattatttcatttattgttgatatgatgttaatatgtaattttcaaatgtatttattatcaaaattaaaatttattttaaatttgttgacatagtataatttttattttatatatatatatatagttaattgttttaaaataatatttttaatgattttaaagatattaattttaattatgtgatattaatgaagatttcaattgattaaattaatcgcatcataaattgaatcatatcaatgattgttgaagttaaagtttcgatctgatgatgtaaaaatattgaaataaagactatataactgaattagattaacaatcatcattatgagttaaaattttgattctactactctcaaagtttcaattgaagtttagttatgtatgtatgtagatagatgaacctaatagctagtgtaatagggatattttgagaaggtgagaggaaatatggatattttgagaatataaaagaaaagagtggagagagtaaagagcaaaaagagggtgtcaatatcatgggcatttccacgcaagatagcagacagcccactaaactacattcaaaatttatcaaaggtatcatatgaaatgagacctaaaagtacttgtgtcaccgattctcatatactctatcataaaaagtatagatgataatttcattaaaattatttacttgtggagcataaaagtaaaaggttacttacgggccttattttgctaataaaataaacattggatttttttttttgtttcattttttgttactctcggattgcaaaaatgcagtcatgatgtcagcaacatattaagaaagatggtattgttgcctagtgttttttactaaggcattatttgcaccttttcaaacctcggacaaacacattttgcaagaattttttttgtctgtttccagatttacagctaccagagttactgttatgtgtgtggttgttaggtaaataattccaatgtgaatggtgatgtgatacacaaattgttattcttaggcctcatcattctattttggagttggaggcaaacaatgatcggcaattctgtgctgtgggttaaggtcttaaggattcttgttacgaatgttatgcttaagatctcgaatttaggacataaatgtaaataattttttttaatttaataaagttcgggtagttctcatttttatatgttgattgttagtttgatggaattgaattagatgttaattctaaattcaaatatatatatatatatatatataattttttcccttaacatataatatataaatgtactcttagtttttaatgtttttatttattatatatatgtgcaaaaattcatcaattttgtttatgattaatttttatgtgagaaaattttttagtgagatatttttttcaataatttttttatatatatttataggattcaattctaagattttatttaaaaaatcaaaacttagttcaatttggacaaacataatgtttttaggctttcaatataataacttaataacttaattcatatttttataatttaaactgtgttaaaagataattggcaatttattataattacaatgttgagatccttgtgggaatgcatgggaaatcggagaatggataataagaaacaaaattagcttaagaatgaagataaatgaggatggggagcagagagacacactctattcccttcccacgcgagtgccatgccatcacaattgtataaatagtagtgtgtgacaaaactttacccgttggcaaatagcacacacaacatttcaatggcggcatgattatgcatctattttgattttgccattatagtctcattctcgtaatcacatcagaatcaaaaagagaaagcagccacaaaaccactactacgtggtaggtgtaatctgaatgggcccagatatgaatatccttgcagggcccactatgggtccaatggcccaccagccgacaaggcccagatagatagtttaggttttcgtcagggtctgatctggactactacctgctaccgtacggtttcttcttcattaatttatttgtttgtttgtttgtttgggatcgatgaaagatttcattccaatgcacacccaaaaaataaaaatataaaattattgctaacctataaatttacagtttacactttacagcgatgctaaaatatttacaatttatatatattcataatgttaataaaataatttataataaatatctggtaagtcgtagttattttcagattggaaacctagaatcgtgatttgaattaaagataagtttttattcaaactatgattataatttaagacttcccaaactaaaattattttaaacctctcaattttgaatacaaggttatcactccattgacttaggctcaaggatcgaccctaacataatgaaattggatcctctcttgctcctattgtctctccagcacaaaaaataaaattagaagctcaaaaagaatgaagagaggaaaataaatgatgaaaaagtaaatagaaagtagagagatagaaagactagacggaactagagagaggatattggcaggagaagatccacataataatctaatactcccatctcacatatgtaaatttaattttcatagctaataatgattatattatattcgaaaagatatttcaattaatttttatatgtttttattgattgaaaaaattgtttaactgtttagtaaataagttttttaataactttttaataatttttagtatttattgagttgttatttgaagtagcattttttaaatcctaacttttaactttttttatatttttattctcttccatatatttatctaatttcctattacattttcaaataaataattatttttatttttatgttattttatacatttgagttacttcaatagttagttttaccaaattcttataaattcttataaataaaaagtgtaaaataacaataaacaataaaatcatttttttttcaaatgtaactaagaaatttgatatatatatatatatatatatatatatatatattaaggataaaaatgaaagaaaatataaaaaactaaaaattagaagataacattttaaaaaatgctacttcaagcaatctttcaaaaaatgctagaagctactaagtttaattattggataatccaataaattttttagctaataattttttttttagaaatgagttgaaatgttctatcgaccatatctttaataagttaacatttcagttatcaactttaagcttttgactaaattttcaaataattttattgaacataatcaataattaaatgattattatcatttccttacaattattataattcttgttcatttattttttaaaagcataatagttttttgttacgaatattatgacgcttttgatttcaccagtttgtgaatatgatggtacataataaatattttattataagtgaaagttacaaattgatatccaatcaaatctttctatacatgatttgtactactttcgtatgaattttttctgccattaatttttttagtaattttttaaagatattcattcatgttgtcatcttgtcgcccttataataattgttatcaattgaaaaagttatgacaagtaactttgtgcaaataagaatttagtcttcaattataataagagatcaatcttattatattggatatcagataagtatttggcctagtcgaatattcaaaaatatatttgataaaacttttatagtacattgaagtatatcctctagaagtgttaggtattcaaccatattgaatatcgagacattgttgtttccatgttattcaaagattgttatattcatgattgctacccaatcactattagtatcctagccttcaaaggttgttttctgttcatggcgtgccaagtattcggccatgttgaatacccaaacacttttgttaccctgattcccaaaggttactttctctactcatatcactgtgaagtattcggccatgctgaataatcaggtactgtatcacacactatttctataggacaatatgcgagtattcgacatgattgaacacagaacactctcacctcaccttatttaaaggtaagactatctaaattagctaataaacaagcattattgaaaaattcaactctttaatgataattaaagatacattagctaaaaaggtaatattgagaaacggtacataggttcaagccccactaaagtgtgtataaatagttacatgaatattgaggtataggtaaaattactgttaagtcttatttattactcataattattgttatcaaccaagacctcttacttgaactttaaagtgtcttttgtaaataccctatcatttggattgccgaacattatttgaagaagaaaggagatcatctaggagaattacacaagaagaaaattatctatctacccgttataatttgagtatcctgtcattaaatttctcaaagatgaatttgagttgtacataagaaatgtactacagtattatttactgttaaattagcttaaagaaccgtttgttttaaggacattgcactttttattattttacaactaaatcatgattgaataaccatgcattgaatttggtaaatccccctgtaaatccgactgcacaaagcacagaatgttagaaccaaaagaatgatgatctcaatgctccattattcagcctcccagtagaggagatctgaaataaccattataaaataataatataacctcatctctaagcctttgtcaccattattgccaaacatgcttattaacattcagtgaaggatgcgtcaaatcccaagattcttgaagtgtccccacctctccgtttctctgatcaacttgaggcctttacctctttataaaccactcttaatgctcatttcttttcatcaaaagcttttagctttctatatcactctcaactttgcttcttttcaatcagttacattttctttggtattccaatggccactgtagaggtaactctactaaaatacttgctactctagttcacatggtagctcagttcagaacccgcaaataaattcccttatgttaattttaatttggcatcaatttcttttattttcagtttgatctcaaccatatacttgcttcgttttttttttttttttaatatatatcatcatacccttcaccgaccctaattaatttggattaaaggtgctgttgatgttgatgatattgatgatcatacccttgcttctgtgttatcttagacaggaagttattcatttctttagcttcaatactccaaccgtcattttttttcctgaaattcttgtcacctaattaattaaattcagtaaaatgacagcaggcacttggcatcttatcaatatatatatatatatagctttgtcaaaaagagttcatatacttgttttcctcagaaaattatatagaaatgtacaaagtagctgaatgcaaatttcaattagtttgtcatcagacagagaagccacacgaatcatatgccttttccatcagtcatatttgttagagtattaaaagacgtattaaatctatattaatctgacagctttgaaactttatccttatataatatatattgcaacaactatgagaagtgatacattaaccaatagttacaaagtaaagaagagtaagaagtgtttaaattaaactgcatgtccaccaccttattaagtttttatctcagcagagttcaagttggaattctaataaacaaaatatgaattttcatctgaatatgtctttgtctgttggaattcgaaattgtaggttgtgtcagcaaagtttgccctccctgaggacacaaaagaggcatcattgaaggctgatgaggagaagaacacagaagaagtttttgagactccaacaccagcaccaacaccagaaactgtcgtcactgagcaaaccaaggaggaaagtactgaggccccacaacctgcagcttcagaagacaagccctcggttgaagttgtgcctgaaactgtcacagaagagccaacagttgagaagacagaagaggaaactttgaagcaagaagctgctgtggaagcaaaagaaaatgctgatcctgctgaggttaagacaccagaagctgcagaagtagtgatagaaacacagaaagaagatgttgctaaggaagagaaagaagctgaggctgaagctaaggaagaggctaacacagaagccccggcagagaaaagtgaggaggtgaaagaagggtcagctgaaaagaaagacgaagaagtgattgcagaagcagaagctgagaagagtgaggaggtcacagtcacaggcacagaggctccaactgagaagactgagtaaagaatgtgaagaggggaaatgtgcagtttatgtgactgttttagttgcatcatgccataatgtgttgttgctccatgtcttttcttttctttgattagtgatctaataaaatgtctagctaggaatgagtgatgacccacttaagtttacgaatgccaaccatcagtacaaggaccacatggcatgtactatttcgatctgtttatgtactgtgagctctgatccaatgaattgaagtatgttatggtccttattgtgtgattctgcatgcagggtaactttctttgttcaaataaatatgtagattatttatatgatttgttcacgtcacttagtaactttgtgttccatgtcgttggccacctgcccgtactaaaaattggaatgaacctcggtcgcgggcatcatagtccatatagatatatgaatcaggttaagaagatacatccaatataatgaggtgcatctaatactggtttgcgagttttaccataaaactagatatggatctgttgtactggcgctttaaattattttcctgtaaatgtctctttcatagtagtaatggaatgcataaatgcgagattaaaagtagaggtaacaactactacttagtgactgccacttagggataaaaataaagcaggctgcaaagtgcaagtagatctccatcgattattatgacatgagggaaacatatgtaccttcacacaacattcaatgtaagatcaagacatgcaagtccttctcacatatatatgtttaatttatttttatctaatatgaatccgtctaatagtgaagagtttgaataattcacataatatgttagagatttaaattttattgttatcattgtacgcttaaaaaaatagtaaaaatagtatgaggcttcttcactctaacttactactcaaacacatttaggattaatttatttaaaagcatgttttgtaaccttagagcaaatttttttttcttaagcatatttttataggacaaccaaacatgactaattttactctcaaacatatttttggaactctcctaaccaaaattcaaacatattcaaacaagaggacttttaaatatgttgtatgtagggcctactgtcttttagacaacatatttataatgttatttacaccttcctttttgttcttcacagcttctctttttgtcattttcccaaaatacccttttttcttatcttcacaacttcacttttttttaatagattttacagaaattaattttcataataaaagtatgttctagtatatgattatagtttccaaaaatatttttttataataaattacaaatattattttggattcaggttcaatgcgttattgtatccctgtggatatttccctttctaaccatacagttgctagtagtctcactgtaattcccaataggggcgagcatgcaaagagcaaaataagagtagaaatagcatgagcctgccttgctttatctctttaaactgtatgggctgaggtgagtttagagtagtggcccaggaaaataacaatatcccttgctaagaatcttagaattaaaacataataaactaacaattattcttatcatacgggtattttttttaatttaaataaaactttaaaatgtggaattaaaaatttataaaaaaatgtatacaattaatttaaataaataaaaatgcaagtaatttttttcgataaaaaatacaaaatgcaagttatttattcttagcaaaaaaatcaattttaaatattattttaaagttaaataactgattgtttttaggtgtcttaacttcagtaactggtatttgaatattggatatgttcttccccatatatatgaacatgcaatttgagccagttgtctgtctctgtcatccaaaagctgaagcggatagagttgagttgagtttagtgctgtgctgtgttgtgtgcgtctttaatctatatagaatttggctttgtgagagaaaaatggtatcttaatttgttttggaactcagcaatggtaagaggaagagatgaaatgtatgtggcagcaatgcctcgaagggctacaaagggaccaccccagtaagctccctcagtttctgggatttccagcatttcatggtaacttatgttgataaaaatggcaagagtaacataataatataatatatgagatggatcgtaacataataacataatatgcaaacgcttagttcagatttgttttgtcaccgataaagtattgatgggtaacttatgttgataaaaatggcaagagttaaagagaccgttgagacaaaaatgagagatggattttgaaattggtttaattactttttttgtctatttttttctttcaatttagccctttattattaaaagattcaattagatcctttgaaataaattatcatgatattgatgcatcatatattcaataattttttttaagaagagtcttaactataagtactcaatcaagtagatcattttttttttcagtaaaaaaaaaatctaaatatattacaccttagttctaagatattctagtaaaatatattagtcaattataaggtaatccgtgagatattcaagtatcaaattctaagagtacaagtaaaagtcatttttctttgaaccccggccaaatcactcaagaaagaagaaaacttatagtcaatatcctcgatttccattattaaaggtgagaagatttatgagaattgttttcaatttgagtttaatttttatatatagttagtaccaaatattttacactggcaatcaattaaaaattataataaatataattttaaaataattattataaaaattatcaagcgtatcatataattaacttataattaaataatagtataaaagattacatgaactaatttctctgttagtttatcttaatggatgaagagctatacaacaacacaaaagtctaaataggcgagctatagggatatagtttagaaaaattaaagagtcagctcagctgctgactttccagtccttcaaatgcatttttaaagaattgatttgaaaattggatgtgacaaataagcattgccaacttagagaaattatagatgatcatcctatgcttatgaacacctagtgaaaaaaataaaagtgaaaaaagtataagttttatagataatgtggggagaaatgagaaatatttgttagatgaataaaaaacattgaacattcatgtatcatcactcgtaaacttgatagaaagggcttgttgaatatacaaagcatagatattaactcattctcacaaatattaatcgttatcgtaattagatggtgatttttttttctttctattttgtgtgaagtatcgtctgctatctaactttacacactagcttttcaatcctaaactatatgcatggaaaatactgcaattcttacgcaaacttttccatatggccaacaagataaaaatagtcaattctattttaggaggcgcacaccatacacacacgtgtgtgtatacatatagtggcggatttaggattctggatcagtgaggacaatttatttaaaaataaaaattgataactatcattattatatgagatagttggattcaaacacgaagataagaggaataaaatatgaagttttaagataaatatttgcattttattaaaataaaatggtacatttatttactcttacgtgtgaacgggtaaggaggttcaaataaataaaattaaggggttcaaaatataaaattatgaggtgcaaaatatgattatttttttgcattttattaaaataagatgatgtatttacttactcttatatgtaaactgataaagaggtttaaatacataaaattaaggatgtaaaatataaaattatgggatttaaaatataatattttaagacaaatactagtgatttattgaaatgagaagatgcatctgcccaccctcaaatgtatgtaggtccgctgtgtatatatatatatatatattttatatatatatatatatatatatatatatataattgattcttttaagataattgcagtcaacaatcgcgtcctgaaatgatcatgcagcagttttgaagaatgcagcctacccactattttataaagtttgtcatcaattattttatttcctggtgtgatatagagtaggtcgaaatttgcttaagtgatcaataatcaccatgtcctgttaataaaaaacaaactactatttagagagataaaaaaaacaaaaatcacggtattttttgttgaaagctaaaagccaaaaatattatgttttcaaacgtctgaagcaaaattttcgtaatgaaaaaccatgcctgtgactaaaaaaagtgacaacaaacattccggattaaaaaaaatagcaaacaaatcccccctccgtcagaaaaaaagagaaagagtcaaagaataatgttgaaatggcttctttattcaataaaaaaagaaaaaaaatatatgatatggatatccattatattatttaacacaagagaaaaaaaattatataataaaactattgatatcacaagaaaaaaaaaaagacaaaagtaaataaaaagattagatatatatttagaataatgagatgtttatatattgttattaaaaaataatataatgggtcggtagaggcataatccacctaacctccaattccattgtcaaagttggtatgcccaaatagctggaattgtaattggaatttgaatagaatacattacatgaagcaatgttgttgttgttgtataaaaaggggctttgtccatccatcaaccgcattaacagtaatacaataatacttattacttttccatactttgagaagctacgtacttacaatggctgctgctattgaaatccccacaatggtgtttccaaactcctcttcccaacagagggtgccagtggttggaatggggtctgcccctgacttcacatgcaagaaagacacaaaggaggctatcattgaggccgtgaaacagggttacagacactttgacactgctgctgcttatggctctgaacaggctctcggtgaagctctcaaagaagctatcgaccttggtctcgtctcccgccaagacctcttcgtcacctccaagctttgggtcactgataatcaacctcatcttgttgtctcagcattgcgcaaatcactcaagtgagcaacttcatttaagcacaattttttttttttttttttaccgataaatgttacttgttagtttattagtttttttattagtggagctgagattcgaagttcgaacccacgcctctcccccctttccttctttcttcaccactaaatcaaccttctaattccccacttgtaaagatttatatacaacttatgtttaacttataactctgtctgattcattttacttcaaatatatatatatcaatgcttttacttacatcaatttttgtcgtgcagaactcttcaacttgagtacttggacctgtatctcatccactggcccctgagttctcagccagggaagttctcatttccaattgaagtagaagatctcttgccttttgacgtgaagggtgtgtgggaagccatggaagagtgccagaaacttggcctcaccaaagccattggagtcagcaacttctctgtcaagaagcttcagaatctgctctctgttgctaccatccgccctgtggtcgatcaagtaagtctctctctctctctttttccgtgtgttgtattttgttttgtttatgggaatgattaatgataagattaattactactgttacaggtggagatgaaccttgcatggcaacagaagaagctaagagagttctgcaaagaaaatgggatagtgataactgcgttctctccactgaggaaaggtgcgagcaggggcccaaatgaagtgatggagaatgatgtgctgaaagagattgcagaggctcatggcaaatccatagctcaggtttgtctgagatggctgtatgaacaaggtgtgacattcgtgccaaagagctacgataaggggaggatgaaccaaaatttgcagatatttgattgggcattgacagaagaagatcatcacaaaatagatgaaatatatcagagccgtttaatcagtggacccaccaagccccaactcaatgatctttgggatgatgaaatataattaaactcctaaactactactactactacctcaaatgtttcatttgcctcggtttgcattttataattcatggcttcatgttcctttacattacaccttaatgagctttcttctagcaagtaataaaatgtgagaccatacaatacaacaattatagatttgtgaggtaacaataaggcactagtgaggtttttttttttttttttttaattcgtgagaataaaagacattgttactagatttataatatctcacacacttttatttaactaatcgctggacttttctcttccttgatttttctcttccttgatagaaagtatttattgtatattaagtatatttttattcaaataaatattaagaattaaacgaaggaactctaaaaactaaatcatatccttagtaaattgtgtgattttaattctattattacacaattatcattctattactatttaaatattttaacaataaactattataattggttgatattttcgtaattgtgaaaattaagaatataaaataatcaagaattagagatacaaacttgaaaaatataataattttttttccataatccgatgatccaaaccattcccaactttaataggattggaaaaacaaagtttcaaaacccaaatcaaagcaacgcaatccaatatgcatcattattttgtattcaatctcaccctaaacctaaattaattcaacccgtgaatattcctacaaaaatgagcacgaagaatttgaaatttgaaattctacagttttaggtaattaaaatacttccacaaattactagaatttcaaatattttttaaatataatatccaaacaacatattttaattataaaattctctcttacgttgaattgctcatttaaattttcttatccaaacataccataaaatttacaattttgactgttctaaaataaagaaaagcaaagtaaacaattttaccaattaatgagtaatgtttcaacacatgcaaaatttgttatacatgtatatataatattaattattgattttctcattaattaccaaaactactcattttatcttcttacatgaattgctcattttaaataaactaaactcaaaattatttatattattttctaaaataagttactcaatttaaataaaccgtatctgaaagtttaatgatgatcagttcttcttaaaaagaaagtgaaagatatacttaaggtaagtctctggatcttagacagatttatgttttcaaaccatagatatggttttgatttttattttgggtatattttgacccgaaatgtctacatgcactgaacttttatgggttcactcaatcagtaaaacgtaagtccataggtcttattagatagctttatgttttcaaaccatggatatggatgtgcttttaatttttattttaggtatatgttgacccgaaatgtatacttttcacgggttgactcaattactagaacagtatattaatttggataaatattagagacaacttatattttattttaatataatagacttaaaagcgcacattcaagtgtaggtgtctttgagattaattatcgcatcggaaaaaaatattttttttatataaatttataataacatatagattttttttaaaataacataaatacaatttttttcataaaacataacatatataacaaaaaaagtattctgaaaacataatgaatacagtttttgacaatcaatcaccttcaatgaattttattaaattttacaaaattatctatgcactagcatgttgatattaagttttaaaataacatataaatcctacttttaattttatttgcaaataaataattttaaattttatttcacaattatgtcaaaatattttttctcctaatatatttaaatatatgtattttaattttaaaattaaatacctctattaagtgtaaaaatagatatatactgtatattttataaatatacatataaaaatgaaatttataaataatataatattaagaaaagaagaaaggtaaataaataaatttatttataagtagacatgtatgagttagttgggttaagtagtaagaaaaggttaaagagtgtcacatcaaaatatcaccatcaacaccaccacgagtccacgacgttatgcaagaaaccaactaccacgatcatgagttgacttgggctacaatgaatgttataaaatccggtttagctctgttggtcgggtccaactaatcagaatctaataacctaacttgatcagttttactattgaatgttcatgcatttaagtcaggataacccgaccaaatcagacccattttgaaaaaatctggcaatccgactgattctacaaacccggaccgggttatgcaaaaaaaaaaaaaaaaaaatggaccatccacgccaccatcttccccgacttcgacgcttcccacctcttcaacctccacccctccgatgccacccgcctcaccctcttccccgccgatctcctcgacgccgccgccctctcctgctccatctccgcctgctccggcgtcttccacgtggcctccccctgcaccctcaaggaccccacagaccccctaagagaccttctcgaacccgtggttcagggcaccctgaacgtcccaaagcggcggttggcatgcgaagatggtggcgatggcgctgatcatggaggcggcgaggaaggagaagccgaactcagcggagttttggaagaggatcatgacgacgtcgcccttgtggattccgaggttggacaatccagcggcaattttgcgggaaataaggtgcgtctcggcgtagtgaaggttttggcggcgggtccaacgatgaggcatgggcggtcggcgaattcagagacgttctcgaagcagtagacgtggagagggaggtggttggagattggtatatctagtaattttgatttgaagacatggctagtttgggaatcacaaactttgttttgatcagtttttggggtagacacctctttggcatcaagagaaggagctacagttatcatggtgtcatatataattttaatttttttaatatatatcaaataaaattagagtaattattagtttacttattggatcattgatacaataatttattatcttgacctaatcaataatggaactgaatttcataatacttactatacttatcacatgatttttcaagtttgactttagttaatgttatttgaatacatgttatattagtatggtgtattatgagtaatgtaagataatatattagaaccagctcccattttttaattgtgtatttaacatgaaagataggatcaaactaattttacatgggatgattttattcaaataggataaaattatacgtgtgacaaaattctttcttttaaatatataacataacctatcattaattaagttaaaataattatgagttgatccacaattttggtaattacatttgaaggtttaaataaataaacatagcctaccaagaagaagggttgactatttcatcctcagaaatagtaattaatagtatagtttggctttgttgtctttgcctccttaacagatgatgagtcatgagtgacagatacgccgccggactggacttggagttttgttttgattccttctcacatggatggcactcacttgacctgttcagtccaagatttttcgttgaaaggcatgggctaagagctagctcacaaccacgataaatcattaatcatagcccaaaaaattaaacgctttaatttcaataaaagacaatttttcaacagcttaaaaagaagtttgagcgaagttttttaaataatgggtcttgttaataagtatttttaaaatattaattaagatattaaaaaaataaattatttattatataaattataagataacgtaaaaaagattttagatatcataatttttatttttgataaaaatatttttactttaaattttttaatcaatatatttaaaatactgattaacatttttcttaaataatagagatttcagggagctattattttatctcgtccattattattggagttaatcttagtcagctatcatgatgttaaccttctgtccatttatacatagctcattttaaggattctacttttccatctaatattattgtcatcatgtttatgtgcagctggatttattgcttagtttcagatatgtaagttttattctaaacgaattaatggagtcatgcaaattattcaaaattttgaaacgggtgtcttttgtgtcttttattatcatttcactggcagcggtcccttatttgttactacatagctagaaatcaaaacttttcaaaaaaaacgaaaagatgattgaataagtcagaggaacatatgttattcatctatcaaagaattaattaaaatgaaagctcattatagcaaaatttgtttaccctgcctaatactttcctatccactgaaatggcaaatctaaagagtcgacgcattatatttacaggaataaaaaaattaaataataagagtatgttttaacctataaaaatattattataataactttcaatttttttatctttttccttcctcacatcacatgtgtcgaaacaatgttgctcatgcatatagcaacaaatggctaatcaattgttgggaaaacaaatctttcggacatgaaacccaagttggtaacgaaaccttttttgtcaagtagttttcacctgtaatttgcccgcggtcaacaagaaacgtaaggaattaagaaaatgatagacatccatccgaatttgcatgtccaaaaaaagagtcaaataattatgtagaaaaggcttctctagagtccaattattttcaaaataatcaaatacgaacattttagtatgaggatccgtgataaatattttttataaattaaattttataataaatacgtccgtactactatatatgtagtatactttaggtttacaatgaataatttaaattctgaatctgatataagaatttttttaattattaatattttttaaaaatttattaaaatgcaattaagacttgaaagagataagcatgaaagattcggccaagaaaagttcacggatcagttgacgacttgacgtacgtacttgatgacaaaggttaaagtttatattattatatgttaagcgagtttcaacaaccaagaaggtgtcgtaggggaaaaaatattacatgattgaaaatagggtgtgaatttggatatgtaaatggagatgttggcggggacggtcatatatgaaatcttgcatatgaaagatttttcccccatggggatggggatcagataaatattctctcgtgactacggtgggggatgggatcacacctccgttttaagaaaattaaataattatttttatattaattattattttatattttaaataataaaatattaaagattgattttatattttacttgtattagaatttaaaattaatgttttaaattgttggtgaaacttttgagtattttttaaatttacttgtattaaaatttaaagttaatattttttaaaagttcagattcttcgaggactgtgaagatctatagagacggagacaggaaaaaaaaatctccaagatggagatcggggatgggatgggagtagggagtattccccgtccctaccctgtttcgttgagatccctaattgaaaactattataatttcaaataatcattacatatagttaaatattattaatttgccaataaaatgagaaacaaattcttttatatctcataatataagacatccttaagttcatatgtattgaaataatttatttagcgagagaatctgtatttaattatgtattttatatgttcataatttgattttcaaaatagtgtaaagtgttttgaatcagattcggacctattcttcatctcatgtgtaaaatttctttggatcatcaagagtcatgcatagcaaataaaattagtttttaacttaataaattaggaaaaatttgtgatacctaacccaagaaaaaatatatatctcttaatgatataaatttgatttcgattacccatatacaaattttgttagtaaaaaatctaaaaaatatttgtataaatattcatttaaccttaagatcgaaccctaataaatctcatataccaactcacctcaacttttaatgataattttaagtgtgtcccagagaaattgattaaaacaacaagcgatgctccgaaagtatctaatgagccacctcgatctcatctgaccaagcttcctggttagtacctttgaattgaataatataaaaaaagaacatgatggatgggggtagagctcagtataacccacctacctccaattgctgacttttcaaagctagactgcccaaacccaaacaattggaattacatgaagaaatgttgcactataaaaaggggtgcccttcagctatgtccatcaacaaatattggaatactactcttgcattgcatactacactatacttgttaaccctttgagagttacaatggctgctgctattgaaatccccacaatagtgtttccaaactcctcttcccaacagagggtgccagtggttggaatgggatctgcccctgacttcacatgcaagaaagacacaaaggaggctatcattgaggccgtgaaacagggttacagacactttgacactgctgctgcttatggctctgaacaggctctcggtgaagctctcaaggaagctatcgatcttggcctcgtctcccgccaagacctctttgtcacttccaagctttgggtcaccgaaaatcatcctcatcttgtcgtcccagctttgcgcaaatcacttaagtgagcattttttcacacaaaaactagttataattcataattaaacttcttttatgagtttgtgcatctttgattttacctttgataattaattctaagtaaaaaattaattttaaatatgattttacatgtttaatattccgttagagaaaagttcaaaattgattatgaattaagcaattttaagtaatatttgcattagatccaaaaatttcgctaaatttaactcctaatttgattttataataaaaatatttgaacataaatcatatcatttcaaaatcaatttcattcaaaattttgtcaacgtttcaaacaagtttattctgacttctataaatgctctcttgtaaaagtttatatacatatataacttaattatatgctataactctgtctgattcattttacttcaaatatgtatatcaatgcttttacttaacatcaatttttgtcgtgcagaactcttcaactagagtacttggacctgtatctcatccactggcccctgagttctcagccagggaagttctcatttccaattgaagtagaagatctcttgccttttgacgtgaagggtgtgtgggaagccatggaagagtgccagaaacttggcctcaccaaagccattggagtcagcaacttctctgtcaagaagcttcagaatcttctctctgttgctaccatccgtcctgtggtcgatcaagtaagtctctctctctctctctctctctctctctctctctctctctgtatgttgtactttgttttgtttatgggaatgattaatgataagattaattaatactgttacaggtagagatgaaccttgcatggcaacagaagaagctaagagagttctgcaaagaaaatgggatagtgataactgcgttctctccactgaggaaaggtgcgagcaggggcccaaatgaagtgatggagaatgatgtgctgaaggagattgcagaggctcatgggaaatccatagcccaggttagtctgagatggttgtacgaacaaggtgtgacatttgtgccaaagagctacgataaggagaggatgaaccagaatctgcagatctttgactgggcattgacagaagaagatcatcagaaaataagtcaaatcagccagagccgtttgatcagcggacccaccaaaccccaactcagtgatctctgggatgatgaaatataaactatttactatgcagctcggagtctatttttataatccatgtttctttctttttaccaacccagctctgtctacttgtttgatttgaggtttaaataattgatgcgatgtcacttcttattttagtatttcgcaccacttcttttccccttttactcaagcccacctgcattgactatttattaatgacccatctttcgtcttcgatttgacgaggttattacttacaccttgaaaagaacactataaatcatcaaatttaatgaagcatatcatgcaaggattgcaatctaaatctagcctaactaacagaatcgtacgtcgcgtgtttgtagctccaataagccaaactgtaccacatacaaggaataaactagggacgtgctgcacatgatatgaataacctatgtttcatttttttcttaatacttctatttatgtgaagaaaagaattttgacaaatattaaattccgttgaaaaataaattaaatatgataaaaatttattttcgtaaaaaatcaaatcaaaatattattcaaacgatttaatttcaatttcaatatattaatcacttatttaacccatttgtaattttatcttaagaaagtttgattacagtgacaaatacttgggaagtcaaatttcttttaaccaattaaaagtaaataattactactagatgatagtgaaacatgattttacactaacattaagttaaatttatattaatctaattatacaatctatacactttcctgcaagtttctgtggtaaaggcccagtcttcaaattttgcgataaggtatgaccaattattaaaaggagtggttgatcagctctactatttctagtgtcgttttatcaataaaaaattcagtcaatcttgtttgttaagaatcggctacaccatttacaccatatatattagtatttgtttttaaaattcaacatattaagctatatgttttcttaaatacattctcttaattggtgaaattaaacagaaaaaactagtaaaagggcgagtgaaagagattgccaacgaaattaatgacaagttataaaaataaaaatcatgtaaattccacatatatgtttttagagttttatactcacgcacgtgccttcgtttccttgtttctttttatctagctaccacaaaaagccatgactactctggatcacctttagatagtctattatggaccacatttaataatcgttagattcatctcaggtttatattgataccatgcattttacacactagatccattctttcctccctctacagtccctctttgtcgtatatgttactggagaaggcgatttccagcgcagcagcgacgattttcttttttatttttaaaatcaacttcttccttttcttcctagattcaccggaatcctcatctctctgcatagttcttgcaaactttcctttctcaagagaggttaatggaaaccattgagtattaacaaacaacttggaatattgcggtcaagagtggctctgatcactgcatacaaacttatagaaacaatttgaggattgaaaacaatttctcacactttcttggccggaatcctcatctccgctgtccacgagattcgcaacatgcggtgcttgtggcggcacaccaaaacctccttccagtggctcctttgcttcttccttgcatctgagaaaaagttccaggcacggggcgtagatttacttccaactctagttccactgcgtgttgcggatctcggtggcagcaaagatgaggaaggtgacgccggcgcacggcggagaaggtctgcagagggatcggaggtgagaacaaatctagtgtgcaacatacatggtatcaatataaatcttagatgacctaacaagaaaacctaacttcaagcattttaagtttgagaactgttctcagcttctaatcgtgacaataataaacaccaactacataatcatagttattaataattgagttataaaattaatatcaatcatttatgaataattatatgattaaaaattatcattttatcatttttatgataataagtaaaaataatttccatttaatatgtccatataatataaacaattagatgattttttttttcattcaacatttaatacataactcaaatctttcagcattcattttctttttgtgacatcttgatcttttttttctccctaaaagaataaacaaaaataacaaaattacaaaaacgaacgaaatgaataaaatagaaatttacaatcagaaatataatataaaaacaaaaataacaatacaaaaaattcaaaaaaacaattaatgttatgtctccctccatccctatttagaaaatcattttaactaatttgcatcccttaaaaaataattaatttaataaatcatattaaatctgtaaattaattatattatcattctaaaattatcttttcttatctctctatttgcttaattatttctcgtttatatttaaagaaaataatcaaataaaaatatgtaaaaaaattaatatatccaaaaattacaaatatatataatcttataaaaaaagataaatgaatttaaaaaagaatattagaaattaaagaccagatataatatatatctccaaatcccattctctccttagagttttctacttgttctccaaatttcacagttttgtaggcaccatatccctgagtcacctaatcattcttaaccttacccctccacgtgacacctattgccttgtccgtggtctctgcgtgagaacaaattggctcagcaccattacaccaccaccgaagccaagggatatattttgaagtaaatggtgtttcaaggagctatcattttaacaacttgtccatttattattggacaatattcagtgagtgagctatatatcatattaaccctctgtagactgacttgagacttccacgaattgattcgcatatgatatgaacttggacagtgttaaagttcagaatgaatacccataacaaataatagaaacgtacaataattaatcattaaaattttaataaggtacaacatattaagagatttaactcaattaattattaatatttatctttaattcttatatattaaaacaataatgttcataatattgcctcaagtctcaactcaattcaatatctcatgttctttttgaagatatacttttttcaacatttatgaattagtgataaaactttacttaataaataatatgatataacattatactatacttatatatatatatatataaataaataaatcataaaatatatttaataagatttaacaatacataacttaattgtatattttatgacttaattatcatcatgttacaaatttttcttttttacaaattttatcattcaagtttttaattttatgtattttagtattcaagtttgtttttcgtatattttaccatttaaattttttatttttatgtattttattattatattaataacaaaacgacattatttttaaaaaaattgatctttttagtgacatcatcatttacaaactatacaaattaaaaaaattcagtgaataaaataataaaaattgaatgataaaatatgcaaataatcccaatgttgcccaatatattatcaagcttcaatcaggtcaaaattatatactacaactaattgatcctcaaattcaaaccgaacaaagacaaagataatcgctgaatataaaaaaaaatgacaagattagccaataccacaaacgcccctaatgtaatgtaatttgtaatgcattatggtataattttataattcaagatagcgaacaatactcgaccatatttgacttgtgtcaagattttcctttaaaagtggcacgcaagttgaaatttagaatatccaattcccaatttattcaatttcaaaactcagttcccttttatcaagtaatgtagaaattcagttaactacaacaacaacaaatccttatcccatacttatcaggcaaaattaatgaatgttttttagcggcatctcatacttttcatacaagaccaagatacaaaaaaaaaaaaaaaaaataacagccacaaatctcacgaatcatatgcagatctaaatcctgccttgcaaacaaatagaagttctattctatttgacttcgtatgacagtaaatggtagattgtggaattacgtagcaatctctgagagatagctggtaaaaagatacactgcatcctgcaagtgaacagagcgttggtcttctggaatgggagcactgaaagaagtgtcaaagcagttaaactgctcatcacgggtagcaccatcacctacacctgatagtagcaaatcacatatctcgcctgccattcttgaatacaccaccctgcaaaatcagtaataaccgtgaatatggcaaatgaaacttctctaaacgggtgacccatcacatagtaaatatggccaactaatgaaataacatgtcaaaaacatacaggtgcttaaattattgggataaagacgtgtggttttgatgtagtaaacaaactgcaaaaccagattcaataacactagcaactaaactaatatattactgtattatcaaattttctttgcctctttataagtccgctgccagataaaaaatggttttggataagtatattagcaggcctataaaatcagaaatcgagctgcacaacctaaaaacaggtcaacaagaagttactgcaaaggacaacacataccttgcatcaacaggtaatctgcaaccccaaacagctagggattcatttagctgactgacaaaatcctgacaagcagcatttttactttcaagagaatcctgaaacaagaaattacatgattttaattgatcaatcaaatggaaaaaggagtattcccttaatctctaacaattgaaatcacaacgaagagtatccactctactgatctagcaaacaaacactgcaactgttacctagcttcataaatcatatttttaagtctattaaaagattatctcatggaaagattgcaccagctagaagcatttcaaataattgggtaacaggcattattgtcttttgcaccactgcatgtgtgtgtggttgtgcccccaaaatatcatcatattttgtgataaatttgtaacatgacaattccatgtttcaagcaggatcaaacttgtttaatatttagttacacttcacaatcatactatgacaggatcaagtaacaaccatttttcacataaatgatgatatgagggatgatcctcttctataaattcacgtaccaattcagtcatagcattggtatcatccggaagtgagtttctcatcaaataaaatgaaatataaatatcagctcccaactcccagttttcaatttcagatttatggtcctccatggaagttgctatcctccatatctcagcgtgttttgctgccaaagatattaaataagttatctatgatgcacttatctggaattaagaagaaaaaatctagtaattttcttctattgaaaagaaataagttgtgataaaatgactttcagcaatttaaagtaatgatgatacaggacaaaatggggtgtgggggggtcaacaatattttattgaattttcatgtagttgttgaagagtttttcttttgtgatttactgggttattttagattatttcatcgtaattatgatgaaattaaggccctgttaggatactatatgaataatgaaggttcttgaagatttttttataaatgtccataaaagagcaagcttgcatgagagacgcaggtattttctggcaaatattattcggtactccaacgttttccttattttttggttttccatagttatgactttggcaaatattattcggtactccaacgttttccttattttttggttttccatagttatgactttggcaaatattattcggtactccaaggtgttttttaccaagcaatatacacacacgacttaccttgcaagaataacctatgagcaactgaagttataaaaatagcatgagctttctgccaatttgcacactgaagaaattgctcaagggcttttgagtgatccccattataattataataaattgcctgcaccgccacaacaaaatcattcaaacaacaataagagtcatttaaagaaaaatacaaaactttgcaacatttcaagcattaatatagcccattaatcagtaaagaacaccaggacaacaatttaattcagttttagacataaattgatcataatgtgtgcccatatgaatctaataagcggtttttgtccttaaaaaaaaacaaatctcataggttttataactcaagcaaattgaaaaaaaatcatttatataaactgaattaatagtataatcagaatatacagtgtgcttgtatttttttttcttttttcattaatggaacaagagggatgtactagaaagtaaagggaagggaatggaacaaagctatcattatgcttatttggaagattaatataggaacagatagaactccgataccctttgagttccccccactccaccctaattttaggggacaaaatttgtgatatggaggggaaatgatggggaatggtcccctgatgttctgttccactccaatctgtttttaaactcccacaaacaagggaacttattgtccttcccctgattccctctccattcctctcattatctatcatccaaacatagtatgagagaaagatgaagttaaaagggtactgcaacaaattatgaatgccattgatatttttctttttacaaaaaaatgaataaaaaattaaaaaatatgatgcataccaaagcctcatgcatccaatctgtgggaatgcctaaatcctcaatgaactgttgctgagattcatctgaactccaagtttcacagtattggaacaatatttcccgaatcagatttacatgaagatatggataatcttcacgaaggggcaagtgaaggaccacatatagggcccaatgacatttccctacacacaaaagctgagacacaaatgacatatctagaatatgaagatcattagaattgataacacccacagcttccaagactgctcgttgatgccaaatcatatgataatcaagtggatcaggggtagaagagaatgcactaaacatagccttcagaaagctgaattttgtctctttgctggcatgaagaagcattaaataaaatgaaatgtcaaagtggttatccgtgttccaactgataacctcctctgatgttccttcatcaataaaaaggggaataggatatggagctgttccctcatcaacaaaatgtttataagtctgaaaagcaatggctaatgaagtgtttggtggtaatttgtaccacattaataaacctaagaacctcctccagtcaattttgatgtcatgcaatgcatcatgaatatttcctgcaagcaattcatagagtctcaatctgtccttttcaatgaaactaaaatccagccctttatttctccaaatatcaagttgccttgcaatatcagagcgattcacagtagaaccaccagcctgacttaacaaactagccaacctcacatctcctttggacaaagccagctgcactgcttcatctagttgccgcccagtcaggagtacaaatatatgctgcagataatcagaatcatttagagagcttatttgattttgaacatgataggaaacactctctcgcaaccaataactaaactctgccctcctcattagagggagtgcttctcggtcaacatcttgataaatttcctttaaatcctgcatcatatcttcctcattgtcagcacccaaagattctacttgacctttttgttctctgtcagaaaaaagaactctaattaactcccaggtcattacttggtgtgtcaaacccaaacgagtagtggaagataacccaggaacactcaattgccgctcaataagatcacaatagtgatgagaaatctcagatagagtcgaacgattagcttcaagcttttgaagtgtcaacttgcagggaccaatttcaacttctttcatcacatggtttattcctttgtgaaaatttaatggagataccaaagcatgatcaacaagttcctcggtcacttttttattttcatccctaaccacattgtcgaaagaaactttctccaaattgacaacagatgataacagtttgtgattaccactgcttcctacgggtgcaccggagtgtacaagaatgccatttggtccccacccaactcgaaatgacttacccataaacagaccagcatcaactatattgtgggcatagtttccagatactggagtttcatgtttgagatctagcttaaaaccttgtgattttatcgtcctaagaggcatgcccttatgctgctgaaccatcaaaatgcctccaggagaatttgaatcaaaattcccatgtttatactcaagtaatggaaatggagtttttctagcaactggtggggtggatcgatggttgattgcctgagttgaactttgtaaaggccgcacatactgcttaccagaagatgatttgcagcttaagtcctctatctcttcttcatcaggaaacatcaataatctcatttctctcattttaacaggatcaagcctaagatgagaaggaagagaatgagaaagttcaagttcattggtatttgatggtgattctttctcaacatcatatacctcagcatcatccataacaaagtcttcctcatcatcatcaccaaacccaaacctgctgaagtgtccaactaagaatttccactcaccagtcactagatcaaaggaaataaatcgtgcttcctgcctctttgtaatttgttttaatttgctaactataacatcttccttcccctccttagacttcaatatttcactgtctaataccaaaactacttcagctgccttgttaaggccctggccaacagcaggcttatcattttcatcactgtatacaactatctcatgcctatgaaacttcacaatttcatctatacgtaaccccctgacatcagtttcattgagatacctgacatatccataaccaaatcttccaacagtgaaatcaggaacacggctgcaataaccaggttcaacaagctccctggccactaattccttcaaagatggtttggtgtaataaccggacgagttcaagataggtagggaagcttcagtttctgtcatgatatcaatggatggatgaaaacagcctttataaacccttcttctcttgcaagtgtgcaaaatgcatgaatcagagacacctccaacgtcacattccatcacaaagctaggtcaaagtgaagcgttgcgttctgcacattgaaatttgaccgcaattccttgatgtagtctctaaaacagaaaaataaaaataaaaaataagcgcatatgccagcaaggggaactggatgttgcatcttatcgcatggaaacaccacgaaacaagcaaatgataggaatatacaggtttcaatttacctcttaggttaacttaaaataaaacgatagaagataaaagaaaagaaaatatgcaatatagctagactacacaacagaggtatttatttataatgaataaatatgagtttgagaatatgaaaactaaagatgatttgattaagcagttatacagatcaagcttactgaaagtgcggcatagcatgtagaagcgtagaaataaaacgaaaagaaaaaccaaatacatagagttaagtagcgtcttagtgcgtaaaaaagaagaacaaaagaaatgaagtaggctgaagttggaatacttaagatgaactcacatcaaaggtggagcagcaagcaacgacgctggagcgagcgaggacggtgagagtgagactgtgagagacggagtggtttagcgggatttgggaaggacaactgaagttgggccgagttttaatactacaacaaagacgggcaaatctacaatgggtatttagtatttacactttccatattgttatttctactccccattggcttctttttttttcttaaaatatatattactaagaagtaagaatatatcttttttatttatttataaaaggtataaactctatttttgaaatatttctgaaagttaatggttaagaatagatataatcaataatatatcatcccaaaacaaatgaattcttcaataatcttgggcctgtcttaaatgatagggattgcttctatgttcactgtcccgaaaagtagaggtatctgtttgaggttcttcaaacgacaatccaaacacacgattaatctcttcgtcaaacacatctttacaacatgtagatatttcaaaacaagctctgaatatttaaatagtacatactaagtactacatttgatctttagatataattgttcatgtgtccttacaaatagaattaccccggacataaagacatgttgggctgtattgggccaaggcccatgaattcccccgctaaagggagggttcttcttcttcttcatatttttcttttttccttaaaaccctcttctctgcttgctgcttgctgctgctgcctcttttggttgagttgcgtcgtctctctaacaaaacaaacaaaataaaaatgatttctgcgatttcgtgggtgcccaaaggggtttcgaagtcggaacttgtcgtggctgaacctcctcccgaagaagaaattcaagggataatcgccaaccacgcaaccaaaaggtggtccttttgtttggttccaacaaaaattatcattcaccagtaaaaccctaacatccaatttttttttatgtgcagtggagacagtgacaatgaagacgctaacaacgatgaagttgtggcacaagcattaaccgtagcagatgcagtcggcaaggccacctctggaacctgtgacgaaataacccttgcgttgaaggaccttgatatggaccgttatgatgacgaagatgaaggtacgtaattctgcattctatatgatcattcattgcttgtacttatatgtatgcaatgcagcagctgcttaaacttacgtttgtcatttgtttaggaattgaggtgttcagttctggaattggtgatctttattatcccagtaacgacatggatccctatctcaaagataaaagcgtaagttccagctcttgttgtcattttattagcgttgcggttgcggcgcgtgtcttcttattatcttacgttgtttatgatgcttcaggatgatgattctgaagaactcgaagacatgatcattaacccaactgattctgtcgttgtttatgcatgtaccgaggatgaagtcagttatcttgaggttagtgagttagttgttttgtgacttgtcaagtcctcgtatattatacagatatatacttatcactcctttctttctgcaatgccaggtttgggttatcgaggatgccgattctagtgaaatgaacgtgtatcctcaccataatatcattattccagcatttccactctgcacagcttggctcgattgcccccttaaaggaggagaaagaggttctttgcacgatacctcttgcgtgtgtatttgtgttgatcgagttgcttgattgtttgttttgtgcaattcgacttttctccctccccagcactcaccatttaattgaattgaagggcgctcctagaaaagtgaaaaataacaagtctgaaggaaaacttgtaaactgtctttaattatatcctctgattatttctgccttcattttagtatgccaaaaatgaaaaatatgaacaattcatatatcatccaaaggtgaagtggaaaaattgtaatggaaagttgcatttcattagaaaataaagtgagattagtatatgctgttcacttctgttgtgtagaccattaaaaaaattcttcaaagtttgagtaactgtctaggtttggactacctgaaatcaccaccattgcaatttgtgtttaaaattttacttgatacctacttgatatatctttgctttatcttattagcttaaaataattttattatgatcacagggaacttcatagctgttggttcaatggaaccttccatagaaatttgggaccttgatgttgtaagtggtttgagtatataaattttaactgtgttgtctgaaatttcatatacaaaaagagagatctttttttctgaataccttgtaattttcctttgctctcagattgatgaggtgcagccatgtgtggttttgggtggatttgaagagaaaaagaaaaaggggaaaaaggtttgttctacatttttgttaatttcaatccccttagaatcatgtgattacctcaaaatggcagcatacttaattatgatttatttgtggaaattgcatatgttgtgctgtttgtaaggtttgtttgtgctctttgaaaatttaaatgcagttaagttgcaaattattgttgataattcaagtattattgtacatgtgcaggtatatatatgcatgtgcacttaaattgatacccttagcttagctttttacttatgaaacttaatcattcatgtatatccatgtacatttttgtccattgttagcattctgactcaataaaatgatagaaacctagtatatcttgttagaaaaaaaatagggaaaatctcccctggttacagcactgcagaactttgatggtgtgcacctcccaatgccaaaaggccctaatttcctctcacaatggcaggatgccttcctttgctctcttcagttgtacatgtgaattcacttcaatgatcgtagctaactaactactaatatatgggttagttgatctcttactacaaaagatagtgaaaatctcccctggttagttactgcattgcagaacttcgagggtccgtgataagcgtaagccacccatcactagggtgtatacttgcaagcagcgagtaatagaagcaacagttctggaccacccaagcagtgctgaccacccaacagacacgatccatccaaggggcgcaaggtcaagcgatgcgaatcaaggggacatgacctttggtgatcacccaacagacacgatccacccaagggacgcaaggtcaagagatgtgaatcaaggggacatgaccattggtgaagagacacaccctttgggaccaggaagtgtgactcagaagggtgcaaccggtggagaaagagtgcaacccttggagccaaaacaacatcagatctggagcagttacaaatgagaacagtcacaaccatttctgaacaattgtgtctattaggaatagatgttagatgcagtataaatagaagtaaaccagattaggaaggggaggaaaaaacaaagaaggatcagtctgaattgtggagaagcaggctctcgaaaacctgtgttattagaaaatatctcaatttacttatataaaatttctattttatcttttctattctacaccatcttctctgttcttatcagtccgcaccacccaatgccaaaaggccctagtttcctctcacaaatggcaccctttcctctcatctgttctaagtgatacccttcactgattgcaactaactaataaataactactaaccaactaattaaactaactgatggcttagctaacaaaactcaactaactaatggtttatctaacataattgagtatatcttttggtcttttctgaattttgtaacttttttatttgggattgtgaatagctttagatgaaaccgaaattgcagatgtcttatgcatatgagcattgaagctactagtgtgaaaatccatatttttgcttgtactattttattagactttcatctttatttttttttaatacttatagatttttgaagtaaatatgtttggccatttcttattaaaattattttcttgcagaaatcaatcaaatacaaagatgacagtcacactgactcagtcctgggtcttgcttggaacaaggagtacaggtttgttgaattaaaactggattctgcttttattttctctgttggatgtgctttctggaacctaaaagtttatcttgacttttattttcttaaaaaaaggaacatactagcaagtgctagtgctgataagcaagtgaagatttgggatgtagttgctgggaagtgtgatattacaatggagcatcactcggacaaggcaagaaattagctagagcataatttattttttatcatgaggtcaattcattttattgatgaaaccaacttttttctcttcatgttgacacacttccttagaattattatataatttagaactttggagatatgatttaaaacatcaaatagattgaggtgatttttgctgcactattatgaaccaagatggaacagttatgtaattaatcatttaatcttcagctttgaattaaatgctttattcaatctatatgtatgtgagaaacgaatttacaagtctttcttgggtctttgttgagcaatgctccacatttttttataatggaaaaagtttctccttctttggttgaatgatttgacgcaatgttttttttttttttttttttttttttaattttctgtttctactttaaaatatttgagtcaatacatttcctgatgtctttcagatttatctcttgtccatctattctcacaggttcaagcagttgcttggaatcttcatgcaccacaggttcttcttagtggttcatttgatcatactgtcgtcttggtaatgatctgatccaatattcctttgttactcggcttttctgtattttgctgtcattgattacttattatgccgtacactttggttgtatattgatgtgctaaaagaggcattcaaattaaaaaaattgtttattttttgtttaaaaattcatatagttatctaatatttatagcttttacactttgcagaaggatggaaggatgccatcacattctggctacaagtggtcagtcacagctgatgtagagagcttggcatgggatccgcacactgagcactcttttgtggtgtgttatagttatttctaggacctgagtactaacatttcttttcttttctttacatttttttgataaaacatactagcacttttttatgataaaataataaccaacattccttcagctactaacttttttatgacaaaataataaccaattcttattctgtaagatcaaatttcaattttgatttcgtggatgcacaggtattggttcactaatagtgatttaattgttctgttaggtgagtcttgaagatggtattgtcaagggttttgatatacggactgccaagtgtgattcctcatcagatccgagttctacatttacacttcatgcacatgacaaagctgttacctcagtatcctataatccatcggcacccaatgtatgtatcttcaacagtttggttagaatatcaactgattatatattttagtttaacctgtgccctgttgacatgacttcatgcagcttcttgccactggatccatggacaaaacggtaatagtgaagtcaattttgttatttttcggtatactgtactttgcagattggaattcatctcatttggctgctattatttctcacaggtaaaactttgggatttgttgaacaacagaccctcttgtgtagcatctaaatctccgagagcagtacgtttccttctttttttattttttaaatgggaaagcttcaacgaatcataatatatttgttaaattggcactgatgactggtatcttttttatggtgtttgtttgttagggggctatctttaaaatttctttctctgaggacaaccccttcttgttggctataggaggctcaaagggtaaattgcaagtaagtgaaaagtgcagatgaacaatactttcgttttcttgatcgttctctgattcttggtgtgaaattgacttgactgttgtaacttgttataatttgtaggtatgggacaccttatctgattctggcatctctagaagatacgggaactacaagaatagatcgcaatctgggtcttgatataattgagttgtgctgctgaagttgtgttgcataaatcaaaattttgggattcactgcaaaaatgcttttttttttttttttgcatcctaataaccttatttgaaataacagatttgaatgggttgaacataaattgttttatgtgattcaaacactatatagttttttactttttagtttggacatctttttggggacaaaacccaaaccactaattaagaaataaatggttgagatgataacgaaaattacgaatactaacatctaacattttttgataaaaaaaactgtaaactttattgtatatttatttaattttatcagttttaaatcaatggttttctaataaaaaattgagtgtatttatgttctatatctccattattttagaagcacaaaatccttaatacatatatacgaaaatatactcttgaatatttcacataactataaatatccgaacctttcgaaataactatgaacctaataatactatagacaagagactagaagcaagtaggaacgaaaatagactaggtcaagttacgctttgttagatctaagctttagcatgtttacgtctcaaatgactttttaaaaggcatgtcttaacatacataaaagtttgacatgatttataagcgtggttgatcaaacaatgaatgaagcctaaagaaagagttttagttattttatttttgggtcgctctttctttcttataagtatgtttaaaagtttattttataataatttaaccttgtgatagaggtgaaaataggaacttgagactttgtaagaatgaagttttacttgtttatatgatatgaacatatttttaaagtctaatataacattcatatgataactcatttaaaaatatattttacagtaaaacccctaaaaatgactaaacttatctttcaataaatcttaaattattcattttttaataaaccaaaaataaagtttatctttcatgatgcttaaaacgggaataagattgatactgtattaatgataatgatttatattttttatttatggtaatttttagaaagtatacttttaatttggatttgttgtaattatatatttattatgattaatgaatttctgcacatatttacgcataacgtattttatatattttgagaatagtcaatttgctttatcaaaaatatactatatctatgtcctttttttttttttggtagtgaatatatactatatctgatatgtgtatgatatttgtgtatcatctctaattaatatgtattgcagtataaaaataataattaatatgtattgtatttgatatgcgtttcatatctgcatatcatatcgatatgtcaaatatgtatcatatagtgccttccataaaaaaaataaaaaatatgtatcatatagcgggtatatttgcaaattatctttactattctactattcttaattatcacttgagcaagtgggaggaaccattttgccataaaccgtgggattaatacaggctgaaatttattagaagttgcataatagggtctctcatctcttgtttaatactaagctattaagtttactcatgattttgtgtatttacaaataaatttaactccaatattttgtaattttcattttattttcggatgaatgaatttgaattattttaaaaaataaatcaaagtagcaattaatttcctaataaaatcttattaacttaaaatttcatgatgcagtttgtaactttatcaaataatacaataatcaacccgtgcacttgatattatataattataaaattattagattatttaattatattatataaggaattataccctacgtgtgcttacgatcttcgacgaagattaatcattattttcgatcgagttacttcatatgagtatcatggtataacaaaattatataaggtatttcaaattgaatttatctgatggtaatttattcttttaacagaaaattaatttcagttgctacaacaatttgccgctgcattaaaatgtttttacagataaattgttattaatttactgttttgaataaaagggtagtcttgaatatagggggaaggggtggttggctatgaaatatgatatcgattcctctgaacaacatggtaactttgagtgtaagaaatactttggatgtcatcttacttctgctgtatgattggacatttttctatagcttcttcattcttcttgttcatctttgactgaggttctacagtggctttaccaaagcatgtatacagtcattttaattagttggtcccgatcatgctgcaaggaaaactttctagagcagtcatgtattactattttactccttagtgtggaaattggaaaatactccggacatggcattaaatattctattgtgctaaatctaaacataaagcaaatgtaatgtatatgggctcatttaataagcagttgaaaaggagccatgtctatactaacgttagcagttaaggttcaggcattcagcagttatcatgtctcaaatcttaaatacagccaaaatagcttattattagttcattactacgaggatcgggatttatccaatccatttctatgattagcattatgattcctatactgataatcaaacacattttttacaagattcaattcacaatggatttgtagaaagtggcagaattgatcaaaggaagggtccttgcgtggttattccctttctttttctcgctttgtgagtatatttttcttatcggcctctggtgtttaaaactaagaattagactgcacttgtgcaagcattattgttaagtcatcccgaaaagaataatacgggacgcttccaagtaccaaccaattccaaagtgctgtcaccttgctgtttcatgtagctatctgttttgttttgtttttcttttcattttacattccaaatgtccctgtattgtgttctaataaactttcctttgcgtttgagtagatcaagtagcagaagagcactgcatcatctttctacatcatctttcagcagaacatctcggtgttaagatccaagcaagagagcactgtcctgttagtctatctaccattttggtgagctgatcacagttgatatcttatgtaaactattccttcaagcaattttacggtcttagacaaaatatattaagggggtgcttgaaaacccttagtttagttgaacacaaacatcatgcaaacagtagattcacactttccaatgcacaaaaataggaagcaaccatatctacgttgaacatgggtttgcaagttttcaactgcaaactgttggaagtgcattggaaaatgggaaatgagtaaaacaaacacactccactccacactctaagcaaccatcaacactcaacttatttctagtaacgtaattaactaaggtctttgagaaatatgttcaatgagtgacttgctgtaatgacgaaaactcaaaactaaatttagacaagatccaacaaggatgttctctctaaggtacaattaaacaatcataatcaaagcagcttaacaccagcttccctgagagaatcaacaaccgctttaaccttaccatgatacttctgctctctcttcaagtgaacagaaacagcgggaatgttcttaagcaaaaggcgttctgctagtatcttcccaatctttgcagctgcagccacatcgcgactagtttccaagcttgatctcaacgctttctcctgcgagcttgcagaagaggctacagtagcagttgggctgtgaatcacctgggcactcacatacttattggtaaaatgcatcttcagaacataaggtttgagaaattgggtaatcctgggaggcctcactgggggtgggataaccatatctgttttacaatataattataaaaaaaaaaaaaaaaaactttttgtgtgtgtcatttttggcatacacataaaactcaagaaatgaacgactatcttcaagaaattatcaactctcagccaagcatttcaatgtatctacaaaatgtaagttcatttcatgtttagtaaatgcaaatttcaaaacatcaactaaatataaatttcaacattcaacatcatgtaaaaatacaaaatgaccgagtatgtaattgtatattaaaaaacccaaaaagcgaaagatgagttaagttagaattattgggcaaatatgaaaaaaaaaaaaaaaacgatttgtttcattggcaactttgatcaaacagttgaaaggcaaattgcttgacttaacgggttaaggaaagaagaatgacgaatataagaaatggaaggaggcagagagagaaggtgaaagggggaaacatagatacctgaattgagctgaataagatccaaggctctctccctctcgctctcgctctgccctcacaagtcacaacccactttctcaaataaatgtttacgacgctgtccttctaatatcttctttctttttccctgtcctttttaatttttttcttttaattcttaaacaaatattttacgtaacttttttgtccctatatttctcaataattaattaaataatatattgataaggttaattaaaatttatccaataattcgcacctattagctttttttttttactttaaataatgtataataatgtattaattaatatattaataaaattaattaaatactagtaacttattacttgtactatcacgatatcgccactgaaattcaacttagtgaaataaaaatcatgaaattttattattattattattgttattaacacacatttgaatttttcaattttaaaagaataatttctaagaaatagtaagaaaataattagagagttttttaggttaaataatagtagagaattagatgtaattttttttaaaattttttatgtatatcaattgacatgtaattgttcgtgaattcgatttttaaatatttaaaagaagaatatagtctcaaataatagtactaccatgcttataacatataaaaaaataattatttgttcgaaataacttcaaccaaacacataaaaaaggattattaggtaaatttaatgatttattcaaaatatatgaatcccttaattacataatatattcttgctgctttttagaaaaatggaaactgatttcgtactaatcacacgaatagttgtttccagttaaaacaaacaactttatctttttttttttttagtttttaatttataattatttaaaaagatctaacaacttatatctgatgattcgtatgttttgtgcatctgttttctcgtacttaatagcaataatcttaaaaaaaatattgttcgagctattttagaaattaaatttgaacaattgtttcaactaaaatatagttaatttatttttttaaaattgataattaaacataatttcataattagcattttatttggtccttaaattagaggaaaattggcttacacacaatgttaaaggcataatttaatttttcacttttttttggagaagtaattatatttttcactaagaccaagtatccttatttgaattaagataaaatgtttcaaaggtatctcaccaaagaatcaaagtgataagggataatgctttgaatgaatttgtataaacttaaaagaaataatttttactattagaaaatatatttttaatgtagtcattttaatattaattttattaaaattaatgttaaaaaagtgtgataatatatttgtaaataaattaaatttattaacatcatttttttttaaaattgatgtgaatatcagttattataaaatttaatgttgtttgatgcttattttcattgatttttatagaaagtggcattgtatttttttccaaattaaaaaattcaaaatctgtttcactctcttattttcgcgctcactctcaccactctcagtccacttccaaaatcccaaaacaacgcttcccaaacccttgacactcacttgcgacactgctcgccgttccctcatctctgaagtccgctgcgatggcgtctacatcgtttcgacgctgctgctgcgatggcatctacgtctacggcgtgaactctctttgttgtctttacccttcgtcagccatcaatcgccatcgtcgtaattctctaaggaagaatccgtgattgtattattcttactccttctttccttcgtttcttgtgtttttatattcaattattgaatagtactcgttgaggcttcatggaaatatatatttagcggtgatagagtggaagccatcggagctaaagctcaagggttcgctgtctggcgttaaggtcgtgactggtttggtagtggtctttgatgatgaagatatcccttaatatatatatatatatatatatatatatatatatatatttacttacttttggtatttctttaatatactaatgtgaggattaaaatctataagactatataattgtaacagttttgtgacttctatccctttctatttatgttttgtatggtagtgatacactagggtgaattgttcaatgtggttgttttaatcatctattattttttaattgggagacaagttgtttgattctattcgcatttgcttcaattctggtttgccttctttccttcaagaaggaaaaaggttagttgatgaagaaatttgttggtggctggtgcggttttagatgctttaactttttaaatatgagagtggacccatgtctgaggggctttgtctgatttcttggaacaaaattcgttgatagtgatagtgatgtcccaattggacaattgaagctactttgctgagactgtaaaaatgatttgcttttaaacaatcacctaatttaatcatgttttacctgattctgataagtcattcggttttgacattgttgttgaagaggcacaacgagctcatgtggaagcagaaagcactaagaatggtatcggtattgtcaagttaatgggtctttacagtggtcagtatcatttatgttatggtagtttacaagtttagtttgttggtatagagttgaagaatactcaagaattgacgcaacttagtggttagtggttagtggttgttgtatgtgtgtgttttatttcattgtttgcttctctttatttttgttgaattctccatgaagtttttgctagtaagttggatcatgaattgagaatatttgttgcttgagatcctaatgtctttttgaaggtatcttaacacattttgcttgtgtttgctagtggtgagaatttgggtagtttgcatcagggaataggttcagacttcattggcactgatgcttaaaaaatgattttagtcaacactctgtattcttcttctgctgatactgatatactgaaactgaaatagctaacaaagtgtatccaagagatcttgcaccctctcttgctctttactggtttcttgcctttttcgttcggcatccctctcctcttaattatctatacagttaaactattccacctaattatgtatacaaattagttttagcattttctcacgaatctaagatgaaatcaattatctatatccagaataatttctcagatgaggaagacagaataatttgcagcctttatgttaatattggaagcaggtataatagttaccaacatttaatgcaaaaacactatcagtataggccagacaatttttttttagccttttctcaccaatcaaagctgaaatcaattatctatatccaaaataatttctcaaatgaaaaaagacagaacaatttgcagcctttatgttaattttggaagcaggtataatagttactaacatttaatgcaaaaacactatcggaatactgctgaccaaattattttttgctttttctcaccaatctaagctgaaatcaatcatctatctaattaagttctcatgcatgccaagttgatccaagtgcaacaccagcatccgctatgtctaattaagatattgagtaaataattttttgttcatagatttgcttcctctttctcatcacaaaaaaaaaccttcatttccatcacctacccttcaactaaagtcaccgtttttacgattactttactttttgagttccaacaaaattttgattcttgcaatagttttaattctgttgtcaggcttgagtttattagtcacatggtcaaacatactctttccaggttgtagaaatccttaaataccggcctttgtggtttcacgactgtcaagctgttgatgttttcaatgtgctacccacaacaaatggtggaaccattgagctgctttataaggcattttcaactcatctattttatgtaatgccaggggtttcaactttcaacgaggcactcaatgggtttactgatgagggatgaaggtcaagttatattgcccctagcacacataattgagcatgaagaggtaataaattgtcactaattatgcaatagaactaatagttttgcaattcgaaatttactcatttctatcttcttcgtgctagtttttggaagtcattaaattagaaggaattgctcattctcctaaagacataataacaccaagagaaaaaaacatggggtgcaacttgaaaagaaacacaagggatgtgagtgtaatttactcttaaaaaatgtacttaatttcaacatcggttgtggttgcaacttatgtaaaaagtgttttacaacatcgattgtgaacaaccgatgtaaaaaagtgttgtcaacatttgtatttgaatcgttgtcgaaagttgttcactttcaatgacggtcgattcaacatcgttgttaaaagtcttccaaaaccaatgttgaaggctttttttgtagtagtgtttacaacatgtgtgttttttttaaatgcttttttaagaagataagatttgattcctaaacaaaataaaaaaaattattttaagtaaaaacaatttagataaacatgagagaaaaataaaaaaaatacttattttattaaaaaatatttttaaaataaatttaaacaaactcgcttttaacattgatgaaaaagaatttttaagtattgaaattttacaattagaagtttatcggttataagttagtgttaactaatgaattaccattaattaatagtaacaagctcaaaccaaacaattgctcggacaaatttacattgatatacaactttattaatcattagttagtgttaactaatgaattatcattaattaatagtaacaagctcaaaccagacaactgcacggacataattaattacatcgatatagaactttattaatgatatgttagtgtaagctaatgaattgccataaatagtaacaagctcaaaccagacaactgtacggacataattaattacattgatatagaactttattaatgatatgttagtgttagctaatgaattgccataaatagtaacaagctcaaaccagacaactgcacggacataattaattacattgatatagtaattatatgttagtgttagctaatgaatttccattaatagtaactaactcaaaccagacaattgcacggacataattaattactttgatatagtacaagtctgttcacattgttaatggttttgaagcttccagactcaagtataaatagagttccatcatattttgaaaacaacattcatcgctaaagagtacaagaaaataaagtttatcaataacaacatggatatgaagttgaatatttcagccatcaatgttttattcttattgctagctatttctagtacaactcaatcggttgacattaatataaaaaaatttggcggaggtgcagatataacacaggtaaaaagcagttgaattccctaaaaaaatgattgaatattccactaattattattattggtattgtgtttgatttgtaatttatatatatgttgtcctcaaggctttgacaaaagcttggaaagaggcatgtgcagcaacaagtgcaagcaagattgtgattccaggtgggtcatacaagatggaagcagttgaattaaaaggtccttgcatggctcccattgaaattcaaattgatggcacacttcaagcaccggctgacccgaatgcactacaaggggctgatgaatggctcaaagtacaatatgttaacttttttaccttatcaggtaaaggtgtttttgatggtcaaggtgcaactgcttggaaacaaaatgattgtggaactaacaagaattgcaagacacgttccaaggtaataaataaactatataactatatagccatttcaattaatctcaaattgctagcacagtcacttctaccaaaacattctaatgagctaaatttcttgtaaacagaattttggtttcaatttcctgaataattctatggttcgggacataacttctaaggatagcaaaaacttccatgtcaacgttttagggtgcaataacttcacattcgatggcttccacgtcagtgctccaagtaccagtatcaacactgacgggattcacattggaagatcaactgatgtgaaaattcttaacaccaacattgccaccggagatgactgtgtctcattgggagatggcagcagaaaagtaactgtccagaatgtgaattgtggacctggtcatggcattagtgttggaagtcttggcaagtacccaaaagaagagccggtagaacaacttctagtcaagaattgcactttgacaaaaacagacaatggtgtgaggatcaagacttggcctagttctccaggagcttctcctattactgatatgcattttgaagatattaccatggttgatgtcatgaacccagtgatcatagaccaagagtattgtccttggaatcagtgctcaaaacaggtacttatatgtttaatcagacacgattcttaaatttaaatgtctttatttgtgaccctttttataatcatactggagttgttattatttaaatcactagtattttagtcttgattgaatatgcactaccgtgaggtttcttataccttgtttttgtctattttgtgcatgcttgcaatggcttagactccatcaaaaataaagataagcaaggttaccttcaagaatattaagggcacttcaaaaaccaaggaaggagtgactcttatatgtagcaaaggtgtaccatgtgagggtgtggaactaaataatgttgctcttacattcaatggagctccagtagttgctaaatgtgctaatgtcaagcccaaagttactggaaaagctcctgcttgcacagcttaagagacttgggttgacacattctccttgatcagatttttcttttgtagattcataagcatcgtcgtaaggtgacgatgaggactatttgaagtctatagtgaataagcatttgtatatacttatgttgtcaatgtctaagggtattcattcaatacgaaatccttgtgcaagagcatatatatatataagactgactttctatttactaaagaaaagttctcatgccggtcacaattgctagctagaagctacgaggctttcctgtcttcgcatatagtgtattctatatatcactattatttatattagaataagagtatatatttatgtacaaaaaaaaagagaatatttataaatatgcttgaaagtgtataatatatttcaaaacaaattgttcaggtcaaattatatttgagatatgtatgccaacttcaaaatgaggttactttattatcgaatgataatgaaacttgttgaagatgaagaagaattatcaacaatcaatcacttatccttatctattaaggtttaaatgaaatcatgtttgtgcaggggtgatatactgtgaacaataaatatgtatatttctgtaaataaaaattatacatgtatgtttatgtatatattaaatttttgttatatgtttgtgtgaaaaatcctaaagtagaccttagccatcaaacacccactgaaaaaaaaatatagtctcgtatttctaaaagaattaatctatatttaatttttttgatattttttatcgggtgcattgttttattagtgatgcttacaaagttctacaaatctatgttaaacgatttggttgtgttaagaatggcaatggggtaaacaagtgtaataaaatactagatagttcacaaaatttgtaaaaatactcaaatggggaaaaataaatccatttatcacatatagttttgaatttgtagcataaaatattcccctttagaaaaagaatcaaaacatatggtaacttattcacgggaccctagatgggtaaccctttaatgtttcacactagtaacaaacaatgcaaaaacctcatatacaatatgctaaaagcaaaccaaaatgacggatgaagaaacaaacaattattgagaagaacccaaaactttgcaagacataaaaggcaaaaaatctaccggaaaagaaaaaggaaaaaagaaatgttgtttgtccatcttttttatattgctgcctcacaagtgatgcatgatacacttccgctatatcccgcaatcagattttacatctcactcaaatcccataacctaaacagcaactcaaaaactcaagccttaacattcccttgtaacctatctctatatctgaaccctcaaaacaggtactccagttagctctagaaaatcaaacatcttgcgtcttaaatcgaaattcggtaacaacagtggtgtgcaaaattcacaattcacctgcttcactggattatcttcacctacaagttcgtgtcatcaaaacgatcttcctatgtagcgattcctgaagtaaatatacaagtttatcagtgttggcatacaagacaactgaaaatgaaaaactaaaaggacacttcacaagtataaagcatcaatatttatttccatccaatttatatgttgatgtgaaaaaattgagcactacaaaggaacatacaacagaaagagtataagtgaattgtagtcaagttttgctaaaagaaaaaagatcaaagataaattcacatcataaagaacttccataacttaccaagactaaagaaattgagattcattgttagaaaaaaaatgaacatagtattacatatcataaagaagaaaatgatgtagaacatattttactcttttacaaagaactcggcgttatatcagccctcttgactaactattaaacatcaagagggtaaaacttcttacattgccctctaagtgggaggggtagagcaccagaggaataacagacaaaaaaaaaacattcaactcttgaatgcatatagcttgctagtttacttcattattaataataataataataataataataataataataataataataaatgttttatcatgtttttcttcttcattaattcgtatttgtgatatgagtgtgaaatcactcgcaatattgttatcaagatatgctacaaatgtttattgttgataaataaaatagcatataatgatattaacattgaagaataaataataataaaagtttgattgtatttttttttctttacattatatttatgatatgagtgagaaattatataaatataaaatcacttaaaatattattaggattatatgctacaaaattagacttatatgtttaatgattatattcaaattaaacatgtcttatattgagtttcatcttgaatttccttaaaaaaaagtttgataaccttgaccaattataaaaatgatgaaaaaggatttttaagtattggaattttacagttagaagtttatcagttataagttagtgttaactaatgaattaccattaattaatagtaacaagctcaaaccagacaactgcacggacataattaattacattgatatagaactttattaatgatatgttagtgttagctaatgaattgccataaatagtaacaagctcaaaccagacaactgcacggacataattaattacattgatatagtaattatatgttagtgttagctaatgaatttccattaatagtaactaactcaaaccagacaattgcacggacataattaattactttgatatagtacaagtctgttcacattgttaatggttttgaagcttccagactcaagtataaatagagttccatcatattttgaaaacaacattcatcgctaaagagtacaagaaaataaagtttatcaataacaacatggatatgaagttgaatattccagctatcagtgttttattcttattgctagctatttctagtacaactcaatcggttgacattaatataaaaaaatttggcggaggtgcagatataacacaggtaaaaagcagttgagttccctaaaaaaaggattgaatattccactgattattattattgctattgtgtttgatttgtaatttatatatatgttgtcctcaaggctttgacaaaagcttggaaagaggcatgtgcagcaacaagtgcaagcaaaattgtgattccaggtgggtcatacaagatggaagcagttgaattaaaaggtccttgcatggctcccattgaaattcaaattgatggcacacttcaagcaccggctgacccgaatgcactcaacggggctgatgaatggctcaaagtacaatatgttaacttttttaccttatcaggtaaaggtgtttttgatggtcaaggtgcaactgcttggaaacaaaatgattgtggaactaacaagaattgcaagacacgttccaaggtaataaataaactatataactatatagccatttcaattaatctcaaattgctagcacagtcacttctaccaaaacattctaattagctaaatttcttgtaaacagaattttggtttcaatttcctgaataattctatggttcgggacataacttctaaggatagcaaaaacttccatgtcaacgttttagggtgcaataacttcacattcgatggcttccacgtcagtgctccaagtaccagtatcaacactgacgggattcacattggaagatcaactgatgtgaaaattcttaacaccaacattgccaccggagatgactgtgtctcattgggagatggcagcagaaaagtaactgtccagaatgtgaattgtggacctggtcatggcattagtgttggaagtcttggcaagtacccaaaagaagagccggtagaacaacttctagtcaagaattgcactttgacaaaaacagacaatggtgtgaggatcaagacttggcctagttctccaggagcttctcctattactgatatgcattttgaagatattaccatggttgatgtcatgaacccagtgatcatagaccaagagtattgtccttggaatcagtgctcaaaacaggtacttatatgtttaatcagacacgattcttaaatttaaatgtctttatttgtgaccctttttataatcatactggagttgttattatttaaatcactagtattttagtcttgattgaatatgcactaccgtgaggtttcttataccttgtttttgtctattttgtgcatgcttgcaatggcttagactccatcaaaaataaagataagcaaggttaccttcaagaatattaagggcacttcaaaaaccaaggaaggagtgactcttatatgtagcaaaggtgtaccatgtgagggtgtggaactaaataatgttgctcttacattcaatggagctccagtagttgctaaatgtgctaatgtcaagcccaaagttactggaaaagctcctgcttgcacagcttaagagacttgggttgacacattctccttgatcagatttttcttttgtagattcataagcatcgtcgtaaggtgacgatgaggactatttgaagtctatagtgaataagcatttgtatatacttatgttgtcaatgtctaagggtattcattcaatacgaaatccttgtgcaagagcatatatatatataagactgactttctatttactaaagaaaagttctcatgccggtcacaattgctagctagaagctacgaggctttcctgtcttcgcatatagtgtattctatatatcactattatttatattagaataagagtatatatttatgtacaaaaaaaaagagaatatttataaatatgcttgaaagtgtataatatatttcaaaacaaattgttcaggtcaaattatatttgagatatgtatgccaacttcaaaatgaggttactttattatcgaatgataatgaaacttgttgaagatgaagaagaattatcaacaatcaatcacttatccttatctattaaggtttaaatgaaatcatgtttgtgcaggggtgaaaagggaaaagagcacatggtgtacaaacttaagaaatcaatatacatatttaaacaagcttcaagacaacggtaccttaagttcaatgatacagttgtttcctttggatttaaagaaaacactattgatcaatgtatatatctgaaggtcagtgggagtaagtttatattactgattatgtatgttgatgatatcttgattgcaactaatgatcttagttttttaaatgagactaagaagtttctctttagtaactttgaaatgaaagacatgagtgaggaatcctatgtgattgggataaaaaaaattatgtgatagatcacaaggattattgggtttgtctcagaaagcatatattaatacatttttagagattagaaatgcagaactgctcatcgtctccagtaccaattcagaaaaggagacaagtttagtctcatatgcatgcaatgtcctaagaatgaattggaacgaaagcaaatggaagcaattccatatgcatcacttgttgggagcctaatgtatgctcaaacttgtacgagaccagatattagctttgtagttggaatgttgggaagataccagagtaatcctggtatggatcattggaaagctgcaaagaaagttatgagatatttgtaaggcactaaaggtcacatgcttacttataggaggtctagtaacgttgaagtgattggatacacagactcagattttgcaggatgtatggatacaagaaaaattacttatggttatctgtattttttagctggaggaactatgtcatggaaaatggaaaagtgtgaagcagtcggtaattgttgcatccactattgaaactgaatttgtgacatgctttgaagccatcgttcaggctaaatggctgcaaaaatttatttcaaggtttgaattggtcaacagtattgatagaccgctgaaaatttattgtgataattcagtaacaatcttcttttctaaaaacgacaagtattcaaaaggtgttaagcatatgacattgaaatactttgtcgttaaagaagaggttcataaacatagagtgtctatagagcatgttagcactaattttatgttagctaatcccttgacgaaaggattatcgtccaagacatttattagtcatgtatgtagtttgtgcattatgtcagctaatgaatgttggtcattattgtaattattgactattgacactctgaattcaatgatgtttaagtttttaaatattattatgttttcaaatttatatatacatgcatgtatgaatgattattttgaaaaataagatttgtccctaatgaagacatataataatattattgtgggacattatgatgtaaacttttattaaagtatcatattaggaagaagagttaataaagtggtacatggaaggaattatgtcgatttgatagcatagaaccgtcatgatttttattagttttatttctgatcatgatttatgaggagaccagtgtatgaaaactttagccctatgtatgcgcattataattgttttcattaaatcatgaaatgaaagttgtgatatgagccaagtgggagaatataagatttatcattgtggctcatttaaataaatgttatttgatttaatgaataaaggacataagggtaattggttacaaagagaagttattaaaagaataactgttgataggtgcaattatcttaaaatgataactgttgataggtgcaattattttaaacttagtggttcagtttctaataaattgaaatttagaaaactgaatacattcatttgtctgtccatgaaagttgtatcttatccctattaaaagaagttacaagaattgaaagggttaagaccatgagaaaacatcctaccataaaagatcttcagtaatcatggacaaaattatgtttatgtgaaactcatgaattttaaagatcttattcataagatttgatgtgtttgttttaaacagaaattataaatttatatttacacaaaacacaccagtggagctcgtgcgccacgcccaagaactcataatctttctcgactccaaaacattcactcgtgaaagtaaacgcaaagagaaggtaaattaatgtcttccttccatcacataattaaaattacgtaacttgtcttacctgactgtgcattcataattaaatctaagattgttttttttcttttgaaaaggcaattttattgcaataaaaaaatttgacacacaggatgtgttccaaattatcaaactgaggacacgagaaattctagacatacccccgtcaagcacaaggttttaaacagcagtccgcaatcgcaattgcagctgcgacgtcaaggtatttctgcaatcgcatcatgaccctaattgtggttgcatcattcgtattttcttgcaacataaaggttttaaacaacggtctgcaatcgcaattgcagccgcaacatcaaggtatttctgcaatctcatcatgaccctaattgtggttgcatcatttgtattttcttgcaatataaatttttttggctaaccgcaaccatgaccacaatttataaccatgatcacaacagaaaatgcatcaggcacatacaacctgttatttatcaaattatgcagcctgaaaataaaaataaaaaataccagaagctttgctcagaattaataccctaatatatacgactgccaccgctatatcatacttcgcaagcaccacaccagatactcaaactcttttcacgcttcagcaccaacataacatgcacgtacaacttttgaaaaaactgatatttgatactttttaaaattacatcagtttcgtcacttttttaatatcgagaaaaaacacaaataaataaatatggttgatgtgattacaattatgattgcgttgtagttgtagacattaaaaattaaattaaatgttgacgttgcaatcaaaatcatggttgcattactatttttttttatgccatgcattactatattttaaaaccttgattaaatcatatatatatatatatatatatatatatatatatatatatatatatatatataaaatgcatgcgttgcagctatcagacctaagcaaaacgtactggagataagaacggttctttatggaaacggagaatcagagccaaatgctgatgcgtgttctcagatcacatgagagtttttcaaagatgacacatttcgcattttcattctctatgtatcaaatcttaaactcggggtagccatttttatatttcaccgtcagttacattatgtttttttaatttctctttctagcatatttaagaattaattcatatatatatgtcggtaggcacgccaagatgcaacccacgtgattgcaatcttgcaaaggcagcgagttaattcaattcgcaactaattgcttctcagtacctggaaaaaaatatagatcttgtggagatgctcatagacgggtaagaatatttatgggatattccacattgaattttcaaattttatttcatagtttcagtactgtgctggataaatggttaataaaagttgatttaattagttatgagaaagagggtgacattgctttgacgtatggtgcggttgcaagggagtgcatgcgccaccagagcgtagcaaggtacgcgattccaatcatcgacctcaattaattaatataatcatgcaatttattgagttatatatccaacatgaatgcttgtgttaggatcataattcttaattgttaactttcggagattaaaaaaaatgtagccaagcatcttgcatggctgactttggaattttactttctttttcctcttttttaaattctgactagcttaatttatgttttttaggcatattttggaatcagagcacatgaagaagttttctgattatattcagctaccaaattttgaaagagcgtcagatgctgttgcaacttttaaagtatgctaattatgatgctatgtcttttaatttccattcacaaatctaagcctaattctcattatttacatgttcttcattttacttgcattgcattgcgaaaaagtcccaaaatatatctctagtatattgcatacatatctacgtacgttatttatattctatattctatattggacaatggagcaaaaggcataaaggatactgcttttttttcgcattttccgagagaaaatgaaatatgtgatgaaagaaatatacaaaaagaaatgtaagagaaactatcatccataatatatttttatcttgcatcttcttatttaattttcctttgttttatgcgacatccaaacaaataatatctttaaactatccaggcttaattatattgatttgaatgtatgtatgcgaagaactctttgtatttgggaatgtgttttatgataattgttttgtataaataggctttgacatgtaaaactgatatcacaactgaaaaagtcgattaactaaaatgttttatttttatatcaataaatattaatttgttaattttgttagaattgttaattttgaacttataacttcttctctccaactcccttcactctaagtcttcccttttcaaaaaaataaaaagtcatccttatatctccctaattaactaaaatttgtcatataatgtgttgctataataaagttctgggtactactattttgctcttacagcaaattcattagcatgaaattaagctaatccattccctgactgatgtacacaggagttattgacaaggcacaaatctacagttgctgaatttctttctaaaaattatgactgggtaagtacgccaaagtctacttagtatataattatgtcatgcaaaaggtacaagtatttatcctctgtaaattcgagaatgtaaaagcaatcaaggctgtagaagagggaaagaattttcccctatcattgttttatctttttgtaaaagtttaaattagacaatttaatttggtttacaaagatttcatcagttgtctttagttggtggcttcctcggtggaatgtaaggtttcgtaccttatatataattgaggtcaacattcacaatgaggcagatatgaaccaaaaacttattcacattggagtcaattatttgaataaaagaagtcatagcttctttcacaatcctcaaatttattctaacataagtaatttggttgttttcatacaatatagctttttaagttttttgtttttatcaatattttaatatattatcagctaaaacgttttactgtgcctgttagttcttcaaagagtacaactctcagttgcttgaatccaccagttattttactagacggtacgctatcaaggtataaataatttaatctgtggtagattccttaagtctcaaattcatttcagcatcaattgtccattttaactgcttgcattagtcacaattttttatccatttcaccattgtaatcaaattaatatgttacagttattgggggatatgttattggatcgctcgaatgctgctgtaatggtccagtatgtgagctcgttcgataatatgaggatcctcatgaatctcttaagagtatatatgcattatcctatactcaaatttttcagaattgtaaattcatgaaataaaagtacttattaatttgttcactccccccccccccccccaatttgcaggattcaaaataagacaattcaattggacaccttacacgttttcaaggtgtatattgaaatggagcaagtatatattttttaatagattcttctaaactcagtgttcttagtttaaatttaattattttaattgacagctatttgttgcaaatcaaaataagcctcctgagattgtcagcatccttgttacaaacaaacataagcttttgcaatttttggacaactttaatagcgacaaaggtataaagttgttgcttcacttctagggtataaaatttctaattttttaattggtcgcatgagttaactctatccttccttaacttttcagcggacgatcattttcaagcagataaacaacaagtaattggtgagataataactcttgaacacaaggatcgtccatgcacatctttggacaattgtgaagttccatgttgaatacttacagtccggatttttaatcatctttcaatttctccaagtcacattttgctacgtgaagtcgatcgtgttatttttttcttttccacatgtcattctcaatgggaagaatcaaatatacttcactgtgaatagaagatacaacgaatttggattaacttattatttgaattatttatttgtttaactttatcttctgttatatttatacacttgtataagtcaagaacctttccacaccaacaatttctatagcctcattatccgtcacggctgcaaaaaagcatcccagcagcaatcaattctggactgagcatgaagcggatttcctcctatatctgacatttacaagcaaatttattgaacatcaataggctaaaacaaaatgttcacgtgacaaatatctcaacttacaaaattacaaaatgtacacgactgcatgcatatgcttatatcaggaactatggtataaaagctatcataaatacctaggtataatggatggaaacaaaaaacatattgtaactgtgaagtccccatgccaaggacatctcccccaagctttttacttgcaaaatataattcaacggctacacttgattgattttccaagtggcctgaattgagaagctattacaatgccaaagtattaactattaaaaaccaaatgaatcattaaaaaaaactgaaagaaattagttttgctgacaattgaaaatagatttccttcatttaccaaaacattgcatagaggtgtacgagtcgcgccccaaagctccgcctcgggatcaccaatattagagtaatttttgaagggaaatactcttcgctcaaaggagacaatgcccttaggcatatcagaacttatcctttgaaaatagtgaaggatgcacaaaaccttatcttgcagtttttcattcatatgatcatatatatatacacactcctgaaaattaagaaaaaccttggaatattgcaagagaaaaaaaaatggactacaccaatgaccaatatcaatttcatctctatgttgcagcatgctgacactaaaaggatcaaatttacgacaaaaaatgagcaaaggattccttacgcaaacaattgatcaaagttgatcatttgaaggcctttcacatggttgtgatcgtctgggaatagacaaaataatgagcaaacaagaagagtagcaaccaactcctgaaaagcaatcacagttgtgcaatacttatgacttcagaattttcattttggtttagaaaccatcttggaggaaaaaagtagataaaatgtaataataagaaagtaagtaacctggctaaggcacacaaagcctggttggtgcgattccaatatgcgaagagcatcttggtagtgtgcttccaacaaagagatagggcaacctccagagctagcaaatctgccaatgcaggaagcacgtccttaaaccactttctagattgctctatagtcataagctgaaattaacaacgcgacacgtcatgtcatgcatgtactcggcaaaacccatgcacgtcaacttaccttgtcaaagaagaaggcatatccacggatagcagaagacttgttgggagggggagagaaagcttttctgagtgcacaaatggtgcgtgccaagtcatcggtcatttccaagagtgtattatttgaggggattgaatctaggttctcttatacatatgttgtcactaaactatatatattcctttatatgagaagttatattcaattgtctttaagtttaaattctacattttttactttttttcgggataatgaatttattgtgtttctggagttaaggagataataacaataattcaattcaatgttatctttaactaacataagacaattaaagatggtgttatgacgacgatgacattaaccaaatcaataacatttacacgtagaaggccaaattgaaaatctgtaatatatatagaaactaaattatgtgtttaaccttacaatttttttctcgaagtttgggattcaaattatggacataattaaaggacgagtaaaacacacatttcatttgcttaaaaacaaaatggatgggtaaaatttcagaagtagaatgattatggcatagcttcaaagccaagcacaatatgcaaacatcaaccttcgtatctcgtgaagacaatgactataatcaaaaggagtagccgcactcgatcgacataataatatctcgtttgatatactatattgccctctactcccaccactagatacaaattttaaaacccgatcacattgtcccatttctaccaaacgcacaacaccaccttgtctttccttcaaagtcaagcatcaaactacatactatttcgcacgtcaaagaaagaaagcactaacgattctcacttattacgagctcaaaatccataatgacagctagcaaaaattggttagtaagaaataataaaaacatgagtatgatttttattgacgatacgaaaattttatttgtagataatttgtaagtaaatgtaaaaattctttgaattttaatttctatcctaataatgatgaagttgggacccatgcaactcacataaacttttttaataataaaaaaatccatgacactcaccctgaacacaacattgttgttaacaaaagcaagcattgaaccatgaaccattaattctctcccagtctatccatcacagatccacggcaccaccatgctaattcttctttacctctcccttgtgtgttcacttccccacattgcattgtcatcccattgcaccgtggaaaccgccacgaaaacgttcgaaaaatgcatgaacctcccaacccaacaagcctccatagcatggacattccacccccacaactcaaccttagaactagtcttctttggaagcttcatatcaccttcagggtgggttggatggggcattaatcccacatcgcccgaaatgaccggaacacgtgccttaatagctttcccggacccaaactcaggccaaatagtgcttctatcttatattcttgaccccacagtgaagcttcaaaaatctccactgctctctcgcccccttgacatccacctcctctcctccaccgccgccatgtacggaggcaaaatggccaccgtgcacaacggcgccgccatccaaatcttcggcacggtgaaactgaaaacgaacaagaccaagattcaccttgtttggaacaggggactttacgttcaggggtactcgcccaccattcatccaactacttccaccgatctggcttccattgctacctttgatgtgttgtcgggttcgtctgctccacagcacacggatctcacgacgttgagagtgatccatggcaccgttaacgccatctcctggggcattttgttaccaatgggagccatcaccgcacgctaccttaggcacattcaagcgctcggccctgcatggttctatgctcatgcaggtgtgatcatcaacacaattctccatattactctttaatttcaaccattcatatttttagtttgactagacagtaaaaagctaaaaaaagaaaaatataaataatatgatatgatataaaaaatataaatgttaataaaatgtttagagtgacaaaatattcacatatcactaatctttatttgaaggatttttattccattataaaagattgaaatattccacaaacacttcaaatccatttgtttatcaattctttttcttgtgttactttctcaattgagtacatattacaaacaccctcaatgagtgtccacaaaatatatattttttagtgttatttgtgtatcagaattagactaccttaatcctctaatataaggattataagtgatatataaaaaacagaaaatagaagagcgtatgcaatatgttatgttatatgatttgattaaaaaaaaacataaatataaataattaatatatatatatatatatattctaaacatatccatatatcattaaattaatgatttaaaaaaaaaaaaaaaaaaaaaaaactcttcgggcagtcatttaatacttgtttgacaatgacttgtgttatagtagtaattgcttaatttgatgataataagaaattggacggaaaataaatattatgcatgcaggaatacaactgtttggtttcgttctgggaacagtggggtttgtgatcggaatccggctggggcaactgtcgccgggagtagagtataggctccaccggaagcttggaatcgcggtgttttgtctgggggctctgcagactctggccttgttatttaggccaaagaccaggaacaagttcaggaagtactggaagtcataccaccattttgtaggctactcgtgtgtggtgcttggctttgtgaatgtgtttcagggatttgaagttatgggagccagcagatcttatgccaagttgacttactgcttagggctctccactctcattggcctttgcattgctttggaggtcaactcttgggttgtcttctgtaggaaatccaaggaagacaagatgaggagagagggactcattggaacttccgacaaagccagtggaagtgccatccacaattaacattcctcattattactctagtatttcatttcattgttccttaatttctcttttaattcattttctatccaatgccaagttgtgcaattataaaggttttgaaatatacttcctttgtctcaaaatgaatgttgtttaagattttttcatacatatatgtcaaaaaaaaatatattctaagcgaattaatattaattaagatatcattcaatttgaattttttttcaaagattaagaagtaatacatacatactttcactagcttctattaatgtttcttagcaatagttcaaacatgacgcatgaattaatgatcatttgggagttccactgcgtcgaaaggtgatgcaggcaagaaatcattagatgatccactattattacttattcatgatttctatcatttttatataaaattaataacactcgattaaatgtaatgtaaaatttgatagtgaatatgtggtccaaaacctttataatttctcgcatgccacggggaaatgtcaagtgtccagtccacacactcccacactactatgtaaggtttgtgagagcaattggaggattaaagcggaaaagagtgaatttttttattgggctagcattaataccttcggacaactcaaattcacgggtattaagttgcaagttgaaacatctcctctccacttctaaaataaaactttgagtattttgaaattagcttctattaatattcattaacaatttttcaatcaactagctagtatttgctttaagagtaattttacttcataatatctaaaccatttcaaaacttaaaataaattattttatcatgaattcttttatttaagtccaaaaaaagtccaagtagccaagcaccacacaaaaagaagaatggaaagtcgtacgagaccatgtctattcctacccgttataacttgtatgttattcgatattcgttgcttcccactatccacttacatggcttttttttaaatagaaaaaaaaaaatcccagcagagctataaagaaatcagtcaaatgacccaatgtagaaatagggcaaatgaaaggatgtgtaaacggcataacatatagaaattgtattaaacaaatacaaaaataggaaacaggctcaaacgaggagggaagaaaaattaacaatatagaaggttttcactttattcgacttcatgtcttctgacttctggggatgtaatattactttccaaaatcagccaacacattttttcttttcctaataaatatatttgtttggaatgatgctttcgaagaaagtttttgtttgacaaatatttaaagcaaaaagaatctcccaaagtcttttgcttttgatttgtctgtctcttgatctaaactaaaaaatatcttctataggatatgatattattcgactcaaaaaacatttatatgatgataaaattaactctaaagattttcttttctatacacaactggaactcgaaagacaatttttatttagtaaaatatactgagttagttaaaatgttcaaaatatctttaaaaaggaaagaaaggcaagcagaaacagattttagaaaataacaattgaatacctttttcaaatattttgaaagaaaaacaagcaattttctaaaattgcaacaagtcaataaatacaaacacacaaaaaagtcatttttcagctaaaacaaaaaaaaataaggaaccaaatttaatcgtttatttggcctcattatttatttatttaatttaattttgtctcactattaataaatgactcaatttggttccttaatttttcaaataccatgcattttagtaatttttcgtctaaattggtctcatgctgttagaactttttacaaattaaggaacctaattgaatcattttaaagatttaagagatcaaattgaatcatttattaatagtggaataaaactgaacaaaataaataagcaattaagccaaaaaaaattgtttattaccatccatcaaaaagtcctgcaataattagatatttagaccacaagagttaaattaaagaaaaacaatatcttaaatgcctaacattaaccctcaggaagattgaagatcggaacagtttctaatctactcaagaaggatgtgctaaacaggcaagtacaacacctaaatccaatttatctatctatctatatattttatatatctatacttaaagtaaaggaagtttgaagtattttaaaccattatatcaagattttaatttcattatcatttttaatttgatttaatcttatttagtcattgatcaaaagttacaatacacaataactattgatttagtttaatcaaatagaatattagtgaaggattaaattgacctcattaatgtaatttaaaaaaaaatatttcactttaattattaattaaggatagaattatttttaacaaaaataattaaagatataaatttagatatatatatatatatatatatataatgtttcatatgaaaatgattttgttatgtaagaatgagaacattcaaattaaaacattatttaattataaaatctctaagatttattaaagaaaatcaaatattttaaagatttaatttacatcaagatcgtcttcacaatcaccattattgtcacaaccatcatgatcgaccaccatcattatcacctagataactgccacaaatccacctacatgactgccacaaatatcatatttaattttatggttaaatgatactttaatttgaatttaaaatattttaattgtgacttttcattttcattttaatttaatagataaagagaatggttgttctaatacatcaaacacccactgaacagaaaatccagtctagtatttctaaaagaattaatctatatttaattttttgattttttttattgggtgcattgctttattaatgacgcttacaaagttctacaaatctatcttaaacgatttagctgtgttaagaatggcaatggggtaaactaaactatagtattaaaatatctataaaagcaagtgtaataaaatactacatagttcacaaaatttggaaaatattcaaatggggaaaaataaatccatttatcacatacagtttgaatttgtagcataaaatattcccctttagaaaaagaatcagaacatatggtaacttattcacgggaccctagatgggtatcccttcaatgtttcacactagtaataaacaaaaacctcagatacaatctgctaaaagcaaaccaaaatgaacggatgaagaaacaaacaattcctgagaagaacccacaactttgcaagacataaaaggcaaaaaatctacccaaaaagaaaaaggaaaaaagaaatgctgtctgtccatcttttttatattgcttcctcacaagtgatgcatgatacacttccgctatatcccgcaatcagattttacatctcactcaaatcccataacctaaacagtaactcaaaaactcaagccttaacattcccttgtaatctatctctatatctgaaccctcaaaacaggcactccagttagctctagaaaaccaaatatcttgcgtcttaaacccaaattcagtaataacagtggtgtgcaaaattcacaattcacctgcttcactggattatcttcacctacaagttcgtgtcatcaaaacgatcttcctatgtagcgattcctgaagtaaatatacaagtttatcagtgttggcatacaagacaactgaatgaaaaattgaaaggacacttcacaagtataaagcatcaatatttatttccatccaatttatatgttgatgtgaaaaaatggagcactacaaaggaacatacagcagaaagagtataagtgaattgtagtcaagttttgctaaaagacaaaagatcaaagataaattcatatcataaagaacttccataacttaccaagactaaagaaattgagattcattgttggaaaaaatttgaacatagataacatatcaatatatcataaagaagaaaatgatgtggaacagattctactctattacaaagaacttggggttatatcagccctcttgactaactattaaacatcaagagggtaaaacttcttatattgccctctaagtgtgaggggtagagcaccaggggataacagacaaaaaaaaaaatcaactctcctatgaagatttgattgcatgcaaatcatgattgcatactctaaacgtatgcagcaaaacatctaaaatctatcagacaattcagaaggaaaaggacatcgaagaactagttctagtatgatgtttacatgacatctatgattgctatccagaagtcagttttcttcccctcattcaaattttgtgaaagacactcgaaaaaagaaggcaatactgttgaaaagagcccggaatatatatctatatatatgaaaatgatcatttctaacaattcaatggaattatgggcaacatgtttacaaattttttctgttttttttttctccatctactaactcacaaaattacaatcaaccatgcagattttgaatccacagatccatacccaactgttttcattggaaaagatgcaattagacaagagtcattatgataatctccattgaaacctcacctttattaagttatacagcttctacaacttctgttcatgaatgaagtaatacttttagtttgagaacttaatttcattaaaatacttctgcatgtgcacattgtaaaagtatgtgtaaggttgagccttgcatctagcagaattcaaactctacttataccaataaacatctgaatcactaatagaaactttataatatataaaagcatatacccctccttattcttttctataaaatataaatcaacattttgaaattatgagtcactatgaaattagaggaaaaggtgatggagcatagagattaagagaagaaacaaggattgtagagaatcaatttgattttatgtcacaaaggtgttatttctggttgacggaaaggtacagtaataaagagacttacatatggtttttattgacttggaaaaggcttataattcatgctatacaagacatgtatgaagtggtaactactagtgtgagaactccaagtggtgaaactaaggactatcctattgagacaggattacatcaaggcttaaggcttgagtccttacttgtttaatctagtcttggatgcttatcaaggacatacaaaaaattatcctaatttcatgcattttgcagatgatataatcttgattgaggaatcaagggaagcaattaacattaagcttgaactttggaggcagactttggaaacaaagggttttgcttgagtaggagtaagacaaagtatatgcattgcaattttagcaagagacgagtaatatgactcggaattaaaaattgaataagtcatatcacagctttctaagtttaaatatttgggttcaatcatacaaaatgatggaaaaaatatgaggatgtcatacaagcgggatggcttaaatggagaaaggcattgagagttatttgtgatcacaaagtacctaccaaactcaaagacaagtttcattacacaattatacgtccagttatactatatggcagtgaatgttgggctttaaagggacaacatgagagaaaagtgggagtagcaaaaatgagaatgtaaagattgatgagcagtcatacaagaaagggcaaaatacggaatgactatatacgagaaaagtttggtgtggcaccaaatgaggaaaagatgacaaaaaattggttaagttggtttggaatgtacaaaagggcccacacaaggcgacaattaggagtatattgcatgatttagtctcgtgaaaagggaaagaggaagaccaaaagggacattggaggaagttgtaagaggatctcaggctaaatattattcctaaagcttcggtttttaaccgtgccaaatggtgttatgtgatccatgttgccgatctcatctagtagaggctttgttgttgtttaataaaactataaatcaacactgtgcaccttgcttactttcctcgtccctcaaactagggacttttttttctactgttaggtatggtagaaagtccatctataatctgaaccccttcctcctctaaaccaagccatgctaaaacaaagttaggttgtggaacaatgacaatcatatacatatttatgaaggttaactttgcttgtttgttactttttgatacctatgggacctctcaattttcacatccttgaagtatattccacacaagattagaaagaaaacccatataaatgtagttagaattctggcatctgaatgacattatggttatctaaagatgtgctagtgttccaagaagcttacttatacaacaaataaggcacacagatacaataattaagggaatggagttcggaaaacaaggaatggggcaaaagtataatgaactcaaacatagataattacttatttagtcaatgtcaccccttctattgaataaccacagagcaataatgtccgtgattgaatgtcactgaacactgttctgagaaacaagctttcaaaaatatgcatccacaacttcacctaactatttaaatttaagtaatgggttgaacatagtataaacaaccaattacaattgttccattataatagcaaacttaacaaagaggataaaacattaatcagagatcaatcagataacatttcctcaaaatgcctagtatctagaaaagggcatttgtctaaattattgtaactcttacccctatttggctgcctcttattaacagtgtaaccaccaacataaccaggagaactcttggcagaaacatctgaagctgtgccaccaagtccataaccaaagggactagatccatctctctcagaatttgaagatcgccaagtggggtccccataaactgaactattattgtaaaagtctgcaaaagccccatcaacaccgccatttgatgcagagtatgaagatgttggtgcaaaagtggcaccagtgcttcttccataccctccagtccccaaaccataattgttgtcaccacctccatatcccaggttgccactactttgtgacatattgttccctcctccctgctgcccggaaattgctgaagaactccagttgactccagtgttgccaaatgtgttccctccaacactcccactccctgatccaatgtatgcattggagtttgcagaacttgttccataactaaggccaccattaccccacaaatttcgagtcacagaactgaagaaagaattgttacctccatttccactctcatatccaacaggactgccaaacctattggagctgctgataaaataaggatttactccccgatcatagctaagattgctattgaaatttgcattccctccaaatccagcattcaaaccaggttcaaaattcatgctcattccataacctgatccaaatgaagcaaatccacttcgaccaccggcaacaggactgaatctatcatccgctcgaagtccatagcctgcaactgtacttggagaatacccctgagtgaagccatttaagaaactattgaccctagtaagaccatagttatatccaccgagtggggtgcggcttggtcctggcgataactccttaggaactgctcgcttgacctcaaccattttaccattcaattcatgaaatgtcttaagtaagaccttgtcaactgcctcctcagaatcataagtgataaatccaaagcctctcggcctctgagtgttgtgatcatacataactacaacatctgttatagtcccaaactgatcaaagtacttcttgaaatcactctctgtcactgttgatgctaaacctccaacaaatatctttctagtgcgacctggaccaggagaaccatggatgctgccactgtttctactcagtatgttctgatcatccctaggaacagctttcttagcctcaacctagcaagagaggaaacagtattgagtatttactgtatatcagaaaataaaaaagttttcaagatctgtcaatccttatgacagatgcttagaaaagagaacaataacaaaaatcaaaagattagagaatataaaatatgtggaaaaatttaatgtactcctgctccattttaaaatctagctaagatattttgagattgtgaatataacaacatttcaacatcaaaactgctaccttccaatgttgcataattcaaaaagagaaccttaatgtcaaaatgcaaactttagacttaaaagggggaaacaagaagattaccatccttccgtcaatgctgtgcttctcttttatgactatttctgcaacagctgggtcagaaaaaacaacgaaaccaaatcccctggctctacctgttgtccgatccttcattatcactgcttccacaacttccccataagtactgaaatactccctgagtcgctcttcatttgtgtcccatgatatcccaccgatgaataacttgccattatctgattgcattttatctacaagcaaaagacacgcctcgtccaattagcatttgagttcaaaaacttagaaatgcaagtggcagcagcgtcattagaaatggacaaagccaaccttctaaagcacctaaccatagggtataagaaaaaggcgtgttcctgatggatccaatccaattccttacatatatctataggctatagcaaaattttatttcatttttttaatgactcatagaaaacaagataaaaacaaaatcctggtgtgggatgaaatgcgcacaaatccgggtaggataaaatcaaaaacatgatagcattatcatttaacaaaatgttgaaatacaaatagtccctagcacgaccaaaaaaaaaaaaaaaaaaagcattacaagcaataccataaattaagacaaactgagagactgtattaacgatgcaaaaatagatattgtcggaatcagttacgaaacaacggatccttcatcaacaatcatcaagcagtgaatcaatgaagggaaagcactcctggagaaaacccacaaaaagtttcaagaatcaaagatccaaaggcggacccaattgaacaaagatcaaaacttcaatcaagattccgtcgaaacccaccgattgaagacgagatctgaggggaggcacaatgagattaagaacagagggcaggttcaatatctggctatgcctccccacccttttttttttcttcttttttttcaattattaatttgattaccaaatgcaaattcagttgtcaaaccgattgcaaaattttatgaagaaatcaaaagtacggagagagaaagagagaaacacatcggaagaagtttgtaaggagaaagccgagacgagaaagaagctgcgagatgtggtatgaccattatatagtgcctctgcaaatggaagatgatgattttctttcttcccttttttctatttttcttttttctttccctattattattttttttaccagtttgatttcaaattagtgaagaataaaaatgggaatctagtttttttgcttcttatttttacctgctagttttaaataaaaatcatgttcaaataatttctgagatcattaccaaaaaaataatttctgagatcgttgttcttttgtctgattgttttttgaatttacttagttgcatttattatctaaatctgtatacatcagtaagtattaaaacaattcaattttaatttatataacaatgtactgaaatgggatattaaaaaaaagtcctgtaaattttaaaataaagaatataatgactcataataaaaattaagacatttataatcaagatttgatagtttaaatttatatcataaagatttataagattaaaagtaatttatgaaaatataaaacttgaaaggaaagagaatataatgacttataataaaaattaagacttttataatcgagattttgatagtttaaatttagatcattatgaggatttataagattaaaagtaatttatgaatataaaatttgaaaagatcttatggatttttaacaaatgtttaagattataagagtcaatgaataatataacaaaacaaatataagattttaataaataaaaaattaaacaaatatgattttttaattttttatgtgaatcaatatatttttagaccaaaagtcaatgactaatttttttttgaggtattaagatcctttacataatgaatatctctcaaaagatatttttcatacataaaagttaggaaccaaaccattatcacattgaaataaaattatctaccaatcacatctttaataattaattataattcttttttctttgttgtttctttcttgtgactcccaatttgaattaataatcaagttatttcaaaggagtagttactagttatcatatcaatcaagaaatttaatatcacaagaatacctattaagctaatcaagtaatattttgtaaatatttgtaaataatattattctaaatgataggaagaaagaaatgatcaataattgtattgtcttcagctaaaggaaaatatataatgtgtaatcggagaaagtatggaaaagtctaaagagttcaaatagattattagatgagtgtaacattcaatatcataatatttatactacttgaaaatcttgactaaatactataatatttctttatcataaaaggtcttctaaaatcatttaaaaacacaatcaaatacactcccttttaattgcatttcaatgttcttatgcttttatctttcttttatgatttttatttttccttttttgtgcattcattttcttcttactttattggtgtttatcaacgacaggttatcgacgatcacaaatcctaaaattggaaaatctttggtattgaccaatgataaaatgtattaaaatttgcccatggttgcaaatcataaaaatgaaaaatctttagtattgaccaatggttaaatgtattaaatatgattaagtaaattacttaggttctatttaaataaagttctaaaaaaatatttatagaaaaaataagaaagtaaaatgaattgagttattcctataaactaaaatcaatatgtgtacactttagttttcaaagtagttaaatgaaaatgttactataaaagttaaatgcaccactaactttaatattttttatcgactatgggactaattctcattttgtagtttagttaattcaaagctcattgtccctcccaaaaaatgtattatgtgggaaatacttattttcttatcctgtaaatatttatagcaaaatccaaataagaccttaaaaaaatattaaatcagtaggacattggtccaattgataataaaataaaataaaaatattttttataattagaaattatatgaaatttattattatgcaaacattttagtacgtttattagaccaaatttaaatcatactttacttttatttcttcaagcttaaattttgtattcacttaaatgtatcaggtaacttattaggtcaaagttggtttgttaacttcaagaaaaattcaaatatccataatataaggcttctttttaattattgttttcttatttaatgtgtttttattttcttctacttttattttacaacatgatttttttcatccttcttttttatgtgcaatgtgtttttttctttatttgtgttgactgtcaatcaaaaaagataaagaaaaacaaaatctcttaatactaacaaatagtaaaatgtattaaatttgatgtttttttttttttttacaataatcacactaagatttgatcctataacctcaactcatgcatattattccaaactctcatataggccaaccttcgtggttcttaatgagttaattcacttactcaaaatatattgaataaataagtcatcgatcaaattgcataataaaaatatatataaatgttttacgattaaatttttatattaaaattattaacatgtatgtatcttaaattaatactaaattttaacttttaaaaaattaatactaaatttgaatcatattttttatgcttaaatttgttattcactcaaatatatcaagtaacatattatatcaaacttggtttattagtctttaaagacaaactctaatatacaaaaaatatctcaaaggattgttttttacttttgttttcttattaaatgcattttcattttctttccctttcatctagcaacaagataatttttcttttctttttgtacgcattcatttttattttttttattttttttactgccattgagtggcaaacataaaaatggaaaatgtttgatattaactaatgttgaaatgtattaaatttgattaagccattagttctaagttctttttggataaacttcttgatcaacatgaaaacaaggtaaaatggattgaatttcttttgtcaactacaatcaacttacatactttatttttaaaaaaatttagaccagaggatctctataaaagttaaatacataagataattttatcttaagtctcattcattttatatttttgtatttacttatccttcatagaatcttttaagattgattcccttctcttttttttttcttccttttttttcccttcctttttttcaacctcctcgtatctattaatgagttcatctactaccgaccccaattattttgggttaaagatgttgttgatgtaaatgtttatgatgttgacttatcctttatagataaatttatctaaataagattggtcaaaatattgatttagtaagtcaaatgttgcattgtataataaaatatcaaataaaatatttttataattaaaattttgtataatatttttatatcaaatattttagtgtagaccaaatttaaatcataagtaactttatttctttaagcttaaattttttattcattcaaaggtattaagtaactaagtagatcaaagatgatttattagcttaaagaaaattctaatgtccttaatataaggatttttttgtatgtaacctagaaaataaggattcttgttttactattgttttattattgaatacatttttattttattctacttttatcttgcgacaacatgacttttttttcatttttattttctccaatcaatcatttttcttcttctttctttcattgtttgcattgacaatcaatcacaataaaaaaatattctattggtaccagcaaaaatattgaatcatgctttttaagcttaatttttttattcattcaaatatatcaagtaacttttttgatcaaagttctttctctccaccttcctttcttcttctcaactctcttttttctttgttcatagttatttctttctccttcttttttttttttgaaacttcaatgaaggttttcatgccattttttgtgaagtcttaccattcttaagcaaggtgctgtggaaaaaccatctcgcacatccaccaaccaccacaaggtttcttccctgcatccaccaaccaccatgaagtcttttttctagtgtacaccaacaaccataggtctcctctcgacattccatttcccttcgcgtgacctcttctcttgaaactgacataacccacccgcgtaatccgtcaaccgtgttacttgaattcgacaaatttcgaaggtccaaacggttggttgcggttcaacatttgaagtggttgaatttcaacattttaagcattttctgcccgaacccaatcgtgaccaaccgttgcttacccctaatttggaatgaaggaaattttaatcgttctaaataatcaaacaagactataaataataaatattaagatttttttgaatttttatctaatagataaagtgtagaaaatgtacatatcaaatatggagaaaatgtttattgttaaattaatttcttcctggaactcattaacatttaatcaattttacacttcaaaaattaacatcaatccatgaatcagttcataagtacactcaaacttgcattccttgtgtgaaagagcctaattgtccttgtaaaacattaatactttagatgacttaattaaggtacttgctttgagattcaggatcttaagatgactaataaaccatgccttgttcctagcaataaggttcattaggtgttcaactttagttcaaggtttaaagagtgttttccaatacgaatgaaattaaacatcaaaatataaatgatcaaatcatacaaagctttaagcatggaataagaactaatattgaagtgcaaaatcaaattaagttataaatagtacataagagtcaacttagttacatccaaccccaacaaggatgagtttagctcctcttagacacatgtagagccaaaaatgagtaagaaatgaagaagatggatgaaggagtcatgagagagctttcaactaccatacaacatccaaggcaagtccatgtgagaattaggtcaaagtgttttgttaagagacacattatttctcatcttgttctcattaagtgacatgtcatcgtgtttcatttagcaatataaatattacatctatagaagtattctttttaggaagtacttgctaagcgagttttgatcaagctatttaaaattttctgttcactacaagaaacatgcatatttatgaaatgccttttcatcttctgcttttatcatgcaataacatgatttttttttattttgcttttttaatccattcatttttcttctcctttccgtaaaatgaataattaaatatgtattaattatttaaatttaatatgttaagaaaaatgcataatccattaattaaattaaatataaacacactcttacagtcttactcattttaaaaaatgttaaaacgagaagagtcttatccaaattacatatacatcaagctcagcatgcatgttggaaaagactacgacaacgtggtgaaggataaaacgaattaacagtggagtttgataatttgagaatagtgcaaaaaaaaaaaaaaattatagtgaaatgttgttggtaaccttaaactcgaagaagtagatgatgggatggacatatataacgatgcagcagaaatggtagatattgatatggcggtggtaaatttaattattgaacagagttgggtcggagcacgatcctgtgtcacgtggaggatgaaggaaaacacatgtacacttttctcaagtgtttttagtattaattcttaattaaaattcaaaattcatttccataattagtattcactttttaatattaccaatggatcttggttgaggcttgttccatttttacgaataaaaaaactttaatattgacttttagtatttattttttatacactatcatgtaaaaaaaatattgttagtcaattaaaattactctaaataaatttattaaagtaattattataaaattattggctaaaatgggagctctatctcaagatcgtctcacgatttctgattttcctccatcagaaatcaccacgttattgttagctgatttagtgggagtagctttcacaaggatgtagttttttatttttaataatttgtgctcctttttccttttactacaaaaaaaaaataactcaataatcttactgtacatgataatttattattaaataaaatatcaattttttatactatcaatatattttaattattagatgaatataaaatcaattttaatatttttttaaattcaattttaatgttttaaaattcaataactaaaaataaatttatattataattttaaaatataattgttatattaaacgttcacttatgaaaaattaattatataaaattaaatatttattgagtacagtgtataagttaaaatgctagttaaattttaaaaatattgtaagtaatttgggtagaataattaacattatttcttctcaatttccagttttcaataaccattacctctttttttttttttttccctttccttttcattcctttattaacgtgactagtgagacataaaataccaacaaagaaaaaagtgaggcataaattaagaaaacccaaacaagtactattttcttatgctagctggagacattaaaagttttttgaactatataataaaaaggaacttaatccgaatatgttccctcccaaatgaaacagatttttaagataaaataaaatttatcctttactcaaaataaaataaaatgatattttcccctattgaaaaaaaaaaatgacttgatttttttaaaacagaaaatgaagtgatttaaataatatgttttacctgcctcgttttttcattatattatttgggatatatataatgagaacaacatttatattaaaagtatgagaattataaatattgatcataccaccatacaaaaacaattaagataaaaaatttgtataaaataattcaaatgttaatagttacatgacatttaaaaggatacatgcgtttattatttaatcgttaaccatttaggtaagacttaatgatacatattcattattttgatttcccaaataattataatattcagtcaaaaaaataattataatattctcacctgagccgtttttcagttatcttgtgaaaaaaatatggcaatgataaaatctagcaaagatacaagatatatgcattaaatttccttgctttgcattgccaaatctgttgtcatttagaaaaggctaaataatatgctcttagttctttacgttatctataatatttaatttagttatttatttttttaaaaagtttaatgtaatcatttacgtttttaaaatgagtttaaacgatttttttttaaataatgatcttttatttattttaggacatgatttaattttttttaactaattggagacttaaaatttgtctcgttaaattaacttccatgaaattatgaaacacaattgatccaactgaatataatctaaaacataaacaatgtatatttcagcttcgagaaagaagaaaaaaaaggacaataaaggcagtgcgaacgttcccctgcaattgtctagttgactttcttgtaatacaaaaggatgatatttttgtagagtgaaaagatgatatcatttcatatatgctaatcacagttcacacgtcataaggatttttttttcgcctatagattcaaaagataataagttgcagtgatcaaaataaacggtggccaccaattgagattataatatttgtaaggaggacttaacctgtaaatcacaaggaatctgtctcgtacaccaagaatataagaatatctaataaacaaaaaaagaaattgagattaccttaaagcgagaaaactcacaaaaagtattcagcattaaaaaaaatgcgtagaatgtagcctttatttgtttgatgcctgtgttttcggttcaattatgaagcttgcaaggtggaacaatagaaaggaactattcttccaaaagttacaagtccatcattggttacccttgccatcgactgacatgttagagagatagcattgactatataattaagggtaaggaggtccgacttaagggtaatattatataacaaaaaaaatctcaaaaagggattaataaattggttgggccaaatatgggagttactgaaagtacactatgaatgaagtttggtgtttttaactttttggctataatgcagtaattaatgcaccgtttcataatgaagtgatatttatggttctataatgtttacccattgtactctaactacgagtgttttctattcagttatgctaatttagctttgtttatgaactgtgcagataagtcactgtgaatcttagtaaacaaatgctcatcttactggtgggtgattaaaccattcaggagaagcttttggttcagtgcttcacatcacaccaattgttgatactgtaactaagttgacagccagtagtgaattatgttacaaatgtgccttctttactttgaggaagacaaaaagacagacaaaactgattagtgggttgatgtctgcatgcctgtcaatgtcagccaccatcactatgccattgtccaagatgcaaatcatgcaatggagctgcaagttttgtggaatttcacatggcctagttatatatatatttatatatatatatatatatatatatatatatataatagcagagtttcttcatgatcctatcatgtcaagttaaaccaatagtgttttgtactcaaatatgacaagttgaagccatctgaaccccaatcttttttgtcagctcttcaatgttcaatatctacaaccttatcctttatataattttaatggacatatatgttatgaatgttaatgaagtatattagcctattaaatggccattaacattttctttcttttgttccttttcattctttctttctctcaccccctcttttcctgtttacttattattttcaatgaaatgtgataaaaggaaaaagagaattgagtctccaactctacgtggttctatttgtatccatattcatacacatcaatagtaaagttcttatgctacaattacttggacaattgactaggagttcccggttttctcttcagtttccgacttccagacaaagttatgcggcgaaagaccttgagtagcctgtttgcataccttctttgtgaagcaaagtttacagaactgatgcaactagtcgcttgtccaattgggttgctccttttgctcagtgatcgagtttctaagccacacggcttcatcttctggcttttgatcaaatttggttctgcttttgtaacaatgttgtgcaatttaaggctttttttcaaggacatgagttcttgttcaagattttggattctgaagcttgttgactcatattccgtagttgagaacttgaaattctgcatcacattgtctttctgcagcaggaagctcaatggcctgctactgagctcaggtccatcagtggatgggctctttcctagattctgacttgcagaatatggatacctagagcttgataggcttcctgacatgtctccacaatgtgcatatctaaatgaatctgagcattctttgaaggctttgtgtgtattgagttgttgaacaaaaagtgcttggacaattagacgtagaggcatcaattcgtcttgaacagcttcaatgcatgcctcttgtgataacctttgacagtccagatacttgcacacggctcccttatcatcttgggaaatacctgaatgtgtctacaataaataaataaaaagaaagaaaaaagcgaaatatgttaaagctgaaattgtattgttcttttttaatgattggtctttgacataagttgggaaatgagctatgatcaacttttgctaagcttgtaaatagtatttactcattatttctcttattctaaggaccatgattattgtatcattcttgttaattattcagttagaccactaggtagaatgctgaacattcattatagtgttcagttcctaaacggatagtattattggcatgagagcatgtgtaatcaactaatgtagtttaattgatgagtcctactttttaagaagcttttgaggaatgctgaatgcttgcttaccttgagaaagctgttgattgttttgtaaagggggtaatgattctgtctataagatggtggtaccctttcaatgagttccatgaatctctttggtcccatatctggatctgcagctattttgaataaatatgcatcccacaactccgcaaccctgtaattgctagcttctggggtatggtttacacgtgagctagatgctacatatgctgaaattatgctttccatagtcaccaactccatgctagaggacattaactctgctccactttctggaagaagaaaatcctccacttgagaaaagtgcaaaagtgatgtaatttggtcttgtaactttgccttgctttcagtcctcaaccccaactcaagagatctagaaagcaaggcaaaataaaaccccactggaatcactttcctagccttatcacccactggaagaagatcaacaacaccttgtagaatcacagaagctttgctattcatgccaccctccccaatcttgtcacaggaactctcccaaaattgacgcgtctttttagagagcacccatttgtttgcatagaaaacaatgatgggactcacatacttctccttcattccttgtttcctcaaagaccctataacccttttgaaaaagccaaagggtagagcaatcagatccctcatccacgggtcttggctcacagcatcatccttcattatttcacagctccaatctttggaagccaactcttccactgtcacaacaggagtgtctctccttctttctggatcaagcacctccatgcatgccatgaaggcaagagattcaatgcagcgactcactattaacagatcttcagaccaaggaagcagcatctggcacctttgaagtgcaataagggtgtcatcccaactttgcaacacaacttgattcagataaagatcaaaccgttcacaaaggttgcccgaacagtgatcttcagtcatttcaagaaactctgctgcacacctaagggccacaacgttaaaagggtcaatcaatgtggaggatccataaacgaacatggcaatcatctcaaaggtttctggtcctccagggaatgtttccggaagctcaacctcagacgcattgtttaacctcttcttgaagtatccactctttgaagtcaaaggaaactgcaataaacacaaaatgcaaatcaataattaaggtagttactggtaagctatgtgaaacattcttggattccaattgtgtctaaacttactttatgcaggttgaatatcttgtctttaactcgaacacggacagaaacaggtaaacctgtttgttggctcctgtgacaaaatatcgaagtgcatgagataaacttcggacatataaccacacgtggaaatggaatgaatgatcaatgacatgtatatattaccatgtgatgaccttgatcttgagcaaggctccaatgttaggtgaagagtaaggactagaagcaacagaataatcttttggactcacaacctccatgttagtgctacttctgacaatggaaggatgctacttattctaactgtgactaaacgaatgcatatgattctgaatccttatctggtaaggaattaactagagcagcagagttctgatgttaaagaaagaaaagtagtgtggtgaagtgagatttgaggagtttgtccccaacatattcttgctggatttgtactattattcaccttgcagtagtcaaagtcaacatgcacacgagtgaaactcgaactccaaactttaaggcttcaaaaacgttctcgaatgttgggtacttgaattcttgggctacaacttggcggcctcggccaatagaatagggtgacttttcatgcatcctaacatctcaatattgcactttaagtttgtgtatgtacaaccataaaaccctactcctaaaattcatgagtattatgttaaccagccatcaaattaattagttaatacttagtggatgaatcaattggtatgaaactatttcagtttgataaattatttcgaattttagttttatatatgtaactatattaaatattatttaaagaaaaaatattgacacttataatgatattttttttttgtcattgaaaatcaaataaagtataggagatttataacacttacatatatatcttatttaattaagagaattagacccccttagttctacaattgtattactaaactaacataggatacccaataacctatactagaaaattagttaatattttattaaatatttttaattatttaaaaatatgtgttttgcatttttaacttttttttttgtttatttgcttaattagtgtcattgtaataattttagtcttttagtataacgtatccaacggctgaaactttcagtctcgattgtctttgtcaacgtatagggccttaattgatggctgatgaggcatttggggaaatgatgggaccaaacagtttacacaaagttacgttggatttggtttaggttttcataaaagaacaatttgggtgtattgggaaaaaagaaatgcaagggtatgaaatgaaataaataggcaattgaggaaatgataggattaaaatattgcaaaggaaaagaagatggtgaagtgcatgtgaagttttgtggttcctttatgtgccgtatgcctaacgcccaagacggcacggctactcaaattggggtgctttggttattgggttttgcttcctttcaaccacggacccctggatccaatattttacttttccccactctttgaaaagtacatgatgcgttgcaaaattgaatttctttttttggattttatcttatttagtaatagcatgatttatgttgtgtttataaatttatatttatattgtagaatatttgagtaaacatgtaattctaaaatttgtaaagtccattgtagcctttcttcatgattcttgatcgtttacatatatgtgtgcattctcatttttcagatacatgttcaatgattaaacatacgatacgacttctacttagactggttaatatctctcagtgattgaagattttgattgtttctgtcaagtgggttaataatgtacttatcttccacttgtttggttaaatatattggtttgcatttgttatgtggttaaacaatgattgtgacttctacttagtagttgagctttccttagttgtcattattgttcacttgtgtatttgcttatatatgagttcaacatcttctcaattcctaaattgtttttttaagaaaaatgtgaattttattaaactattatttattattgcaagtcacgaaagagatacataagtacgagatacaatttttttaaaaaaaatgatgcacgaaattaacaatcttcctagacccttatacatccattatagaagggaaagtttctatacatcacaagactccaccgacagggaaacaatgagcaccaacaattatgatatcgaattcagacaaagcaaggggttagaaatccattcaaaaaaaggaaaaggatgctcgtggcttcttagcacctgttgtatacacggttctgcctctctaaaaattacatgattcctatgagttcagatagaccatagaacaggcatccaaattcccatccagcacaaatggtccatattccctctacaaagcccatggtgactccaaaggtaagcaacacagattgtagggagagcttgttgtaggccaagccagccataacagctttgccacaccttgtatgagaaggagtaagaaaaaacaaatgaaatgcagattcagtctcagcattacacagtttacataacaatccttcctcagccacacctatattccttctcaacaaagcttccttggattgaattttgtctagtgtcacacgccacctaaacacaagcacctttgatggtgcttttaccttccacaaagcattaaaaaaacttgagtggtcatcaatcatcaagttttgaattagtgtatatgctccctttatcgaatatccctccgagggtaatactctccacaccaccagtccttttcggtttccaaatttgtaatagctgcagcagttcttcttccatagggatttcccattccataaagggaccaggaccaaaccacttacacaaaagagctttgttgaatgtttatataagcagacaatcaaagagattggtctgtaatcccccagaccttgtggagtctcctttttggggatgagcgcaagaaatgacgcattagcaccaactgaaaagcgaccatatctacagaattctgccatgaccctcataatgtccgagttaagagtatcccggaagtgcctaacgaatttgaaaataaatccgtcaggacccaggcttttgctcccctcacagtcccaaatcgctgccttgacttcctctttcgaaaagcttgcaatcagaccaacactatatttgatcatcaagtgttggaacctatcatatgaagacaaataactattatacctctccttaacaaagtctttgaaccctataaccatccattctccttaacaaagtctttgcagatttgaggtgaactcaccattctcccctctcttctttcttccgtccttcttactgcgttattttggtttgtattatttatctcatgccgtaaatgttaataaacaactaccaacttgggagggtgttggatatatatagctagaattagaaagttgttagttgggttaaaatgatgatttagattagttactatctcatccttgcatataaatgcaactagaaagtgacccgtagatagagaaaatgagaaagagattgaataaaaataaatgagctcatacacaaaatggggatacaaggcgatgcttgcatggtttttatagtgcaaagtgcaaaccaatgatttacttgtaattgatatattttaattctaacatttttcttgtactcgagaaatacttgaattaccttatgcataattatcatacaaaaaataaacagttaactaaattagtaaaagaaagttacaatcaatcaaagtagtaaaagttcaatcctttataacgcagaaaaaaaaaaaagtctcaacatagatgtttcttaatcaccatcctaagactagaaatcacatgcctctcacgagtcttctagttaaatgaagggaatcttgtgttctctaaattaaacaaaaaacaaaagttacatatatacatttttatattattagttattaattacttttataattaattttgtcaaatacttttaattcaataagtttatttataaattttcagctttaaactagattttaattttaaattagctaataagatggttttgccaaacataataactaacaaagttttcttttcgtacattttagtaattaaactctaactgtaacataatttatcaccaatattttacatatatttttgcagaagctacccatcattttattataatttcttaatgacattcggcttccggattttgcgatacgtaaccttctattaaaaaaatatgtatcgtttttgcacgtgtgattcttatgctgtacgttttttataccgtaatggctttttttattttttataattgagtcttacatcaagaggctggctacaaaatccacaggaatttgatgcagctctattagttttctattcgtagaattcaagtaatcatttatcgaagttgccaatacatatgcagatgtggaatttctaataggattattaccgacttaccgtcacgcatttttttttgtgagcatttatggtcatgcatttactgtattatctgttatattttcatttcattttttcttcttgtctctttagagcatgtttgattaacggttcaaaaattatttttgggtgctaagcttacttttgaagaataactcagtttcataatatgtttgattagtttcaaaaatatgattgcattaaaattttgcttagaaattaagttttgtaataacaagctaagacttgacttgagttgtttctgtaaacttaaatttaactcaaatttaatcttacaaattttaatcgaaatataacttacttattttttttctattgtatgcgtttgatacatttttctccattttttttttatctctcttctttcttctttctgtttatacactctattttttagatatatgtttgataatatttatatttttttatattggttatataatatttatatcctcattgatataaatataaaataatctctctatttgtaagtttggtacttctggtatcgatcgatttccattaatacaactgctttgatgattttataaaagaaaaatacgtttgatatttttcttttctaatatagtaatatacatctcttagacagtgaaccattgacacgccgcctaaggaaggctttatcatttgcatttgcaactagtaaactaccaaggaatacgaatatgatgctgttgccaaatctttgtagcagatttgtgcttcttaatgtcaacactgcgaaattctcttaattttttgttttttaatggagggatctttaaatttaaagaagaaaaaaagcatgctttgaatactgtagaggttactaatatatgtcttctcttctcttgtttttacttttttttctttttctttttaaagctcacttatttcattggaaaatgaaaatttcaaacaattcatctacttatagcaaaattagggataacagcaatcaaacgcgagtttgcttactttcagtcttgtccctcaaaaggcgggacaagttcgttttgagtttataaaagatgaggtgaaaaatgaaattcaatcctattcttccctagattttatcatgttcaaaaaaaattataaaaaatctatctcacattttttttaaattatttgttcatatactttaaataaattataaattaaattattaattacatttcaattcaatatatatatatatatatataatttaataaaaaataaataacataaacatatttaagttaaattatattttaattaaatgtataattttaaattttattataattagtattataattataatattatttatttaactattaaaataattattctatattttaataattataaaaataaaacatgaaataattatataattaacaattacatataatatataattatagaattatatataaatatgtaactacactattaataattataaaaatataagtaatattcctaatcccacttccttgggaaatccgaactctacctgggtcccaattaatatgggtttttcacgtaaaactcatggcggagtcgaatagatataggttggatttttattgacatacctaagcaaaatgcaactatttgaaaagatggatttattagttgttgaatacacaaagaaagagcgttcgtatattttctaattcatagcaatatgattgtagaacataactaatgtaatacaaactttgatttaagtttttgtaagaaaaaaacttttatttcagtgtattttcatacaagaaatatcactaacacgttatattatataatctgataaaaaaaatcatataatatttttaaaaactcaatattattatctgaaattttttaactaattaatgaaatgaagtgatgatgagtttaattaacttctaatttaataccaacatatgtgacttggaattggcggaatgaactcattcttcacaatgtgacaaactaaaatttaaatcctcgttaagagaaatgactacatttaatttttcatcatgtcttaagtataatgcttttgaaaaaggatattgtgagaaaaaagcttataatttaataacttttactcataaatttatgagttttaatttcagtaaataatttattaaaaagtatgattttacttttctttctatatttttatgctttttatttattatttaattcatcaaatactcgttgaaatttgtagagcctattttatatgtagtattgctgctgcttagttcaaaggaaataatgtctcgatttatttaacgagtaaagtagaagttattcatttcaggaaatgataaataaggagcaagcaggagctagagaaaacgaataaaaatgatatatttttgataagtttattatggttatagaaaacgaatatacttttttattttattttataaaaatgggctacatataagtaacaaatacttctatccaaaatgacaaaataaatgattgtgattctagacatgattagaaaatatgacatgattgattagtttgctatgtaaatttaaagaaaagtttttcacctattaaatggcgtagtttaattttaaaaaagtatataaaagatagaaacaatattattattaaaatatgatgaaattgtgcatttaagaaagtttttctttcttgtcatattttctattaaatctcacatgttttcaagatgaatacacttctcaaaattcaactgaaaatgaaaccatgaattacttgctaattaagaaaactgtcattaacctataatcttaaatcaacctatatatatatctatagaacgaccatccattataacttattcatcctaatatcgcggaccaaaaacaaaacttattcatcctatcacatgttagtttttagttttggggcttaaaaaacatagtatgctaacctgtttggtctattgggtcgggtcaatttgaccttgttgtttctgaacctcaaaataaaaagcccatcggcctaacccattgggccgggctaattttgaaagctcactttaggtggacagataagaatgtagttgcagagataagcatctaaatttgatagttaatcttaagcttgttggtttcagctcaagagatgatgcaaccaattttaaggaagccctcccaagtcctaacggtttcactgttgaagcaagtaaaacagaatatgccagaaataaatgagggaagcagctggaaaacaagtggattggcattttctccaaacagtgtcatctattgttcagtccactgcggaagttatgtacatcactgatatagtgaaactggagtgaaatgcatgtactgaccaacaattagttgtggcctgtgggatacgaatatacttggaacttggaagtaaaaagtagttggacataagggtcaaacaatgaactctgaatacgtgtgaatgaaggtattcaattgattggcgttgattcttcatcattgttgagttcataaaagaaaggatcctcaaggagatctgtggctgaaggtcttgcccttggctgtgctatgcacttctcaatgaattccttcacctcaggatctgtgactttgctcaaggcctcaggcttgattcccatcgtgacctttttgtatatctcggccacaccgtcacattcactgtagggtatttccattgttaccatttccagcaaacacattccaaaagagtatatgtccaccatctcagtgtaatcttcctcgtacagttcgggtgccatgtactctggtgtccctaagattgaatgtgctgcatggttacgtcccactattgcagccaatccaagatcaccaattttcacctacaaaatgccaaggtcaaaaatcaagggtctatttatttccattcacttttttggttttataaactgttttctaaaacaattccacattatttagtaatccacttctcatccaaattttgaaaattatttccaaattaccagaaagcagaaataattaagagatgtttttcaaactcttcttcaattctacactctctttttgccttgcatcaccctccatcaactatatgagtgaccttgtttaattccattttcgaaaactaaaaacaaattttggaaatagtaactaaatacaccttaagttttcaaaatgcaacctagcaatgcaaaacatagcttatgcataagcaaatttgtaatttgtagaagctctcttctcttagcttctccaacaactgatttttaggttatgcataactgcataagctaattcatcgtgtaacaaaactgcattttctttgaaccacctaatcattgcttaaaaagaagagaactgcatatatatgttggcatgactgtgttttcgtttcttcatcaatcatcaatagcatgagaaatactaattaataaaaacaaagcaattattaacctggccaatgttgccgttgacaaagatgttgctgcaattgaggtccctgtgaatgatgcaggggtcatgcgtatgaagatactccaatcccttaaggacctgtttggaccatttcttgaaggccttaatggagacgtggcggtgcttcttgcggtaatccctgaggttcccggaggtgcagacctcagtgatgaaattgatattgtggcgctcctcgtccttccacacgctgtaacagacgatgatgtacttgttgctgagggttctgagcaactcaacttcagagtgaaggcgattgatgagagcagtgtcttcgctgaagttcctcagccgaacctgattccacgccacctcgattccttcctcctgatcaaacgctctgtataccttcttcactgctccgcaaccaagaagatccctgtaacgcccgaacctccccgttggatcaacctccacgaacgcttccacttcgctatcgcaactgttcgacttctctgcaggcattttcaatctctctctctggtggtaaaaggagaaggaaggaagggaaaaggtggtgaattcgattacctcgctaacaactaacagcttaactaaactaactgaaaaggaatttatgaaactgaattaatatattactgattactcgttcaataattttctataaccctactttttcgctctgtgtcggttcattatcacatcaatgatcttaacttgtagtatttttttttgtccaatttctgatatgattgtgcatgaagcagcaagtacaatagtgaaaatctatgcgtaagaagaaaagcttattaccttaacaggtggcgaacggagattgggaatctgagacctcaaatatttgagaccctacgcggaagtgtagagaataaataagcaagggaagggaagggagattgagttgttgaatgagatggcaaatgttgaggtacacacacaatctccttttccgtttacttttttttagtttttaactttgtgttaaaaatcaatatatatatatatatatatatatacatgaattgaaataataattcttcattcattttcattcattttattcattcctctcttctttctttcatatattttcccttaacatgaggtttttatatatataagagcaattcaacaacatcctaataatacggaataataacaaactgatctaatcttaatttttatttgaatataataataaaaaaatgtaacaacctaacaaattataataataacttgaaatttaaataatacaattcaacactcccctcaagttggtgcatgaatatcggtcatgctcaacttgtcaattgcttcttcaaacactctttaaggaatgactttaatcagcaatagtttcaagaagtgcttcaagatagttcacaatgtgcttcggttatgtgaggtagaaagaaaattgagatacggaaagagattcggaacaataacatgttcatgtcaatagacttcagggatggtctgtgaaggattcagaacaatgcaacgagcttcacatcaatgaccttcaaatggaatacgtgcatggagaattgaaatacgagaaaggattcggaacaatcacatgatcatgtcaatagacttcagggttggtatgtgaatgattcaaaacaatgcaactgacttcacatcaatgaccttcaaatggatacaagaatgattcaaaatggaaccaaaatcgcaaaggttatgcaaggcaaaaatgaaattcatgataataataatcataatttgtaaaggaatcggaaaaggtgaaggttaaggaggagatagatggttggatataagtgaaatacattgaagataagataaaaagatagaaggagatgtacgtttgggattgtgaagaagaaagactctgaacaaataaggcatcggaaatatggtggatatcatgattctcattcatggaggaaaccatgattttttttcatggaggatatcataactctcattcatggagggaaccatggctctgataccatgttaaaaatcagatatgcatatattggaataataattcttcattcatttcattcatttctcccttctctctttcatatattttcgctcaacatgagatttttacatatataagagcaattcaacaacatcctaataatacggaataataagatctaattttaattcctatttaaatataataataaaaaaattgtaacaacctaacaaatcctaataataatttgaaatttaaattatacaattcaacactttgtagtaatacatttgagatccttgccatgacgcaaaattgtaatgtaatgggaatcattggatctggattctgaacttgtttgttacgttcacgggaagaatggcaaaacatttaagtttcaggcaaagcccgtacccatgctcaaccaccattaccaacagtctctcttactgtattatctgaaatctgaattttccaatattttcttcaacaaccccaccccttaatcatgatacttccaattaaataccattttccctatgcaaagtgtacaaaaactactggtgtaatcttcagcgattctgttttttcaattattcaaaagctggtttagttacgttattttcgttgtctcttcatgcatgagttatggcacgcggtacctgtacgttatggctctaataaaaggctatatttttggggggggcgggggggtgtcaattgacatgaaaattgcatcaatctgttcaacagctatatcaccttgatgacgacatgtctaattgtcaaatgctttaatctgaaacgtttagatccattgaaattcttctcctttttattatagtgcaacattgtagtcttgtgagtttatcagggcgtgcttgttaatacttttgaaagactacgcacccacaaacaacgtaaaaataaacaagcaactcagatgagttgatcaatagagcttatcttttcggcaacaataaccacaaacgagtaattgatttgtcaatggactacaccgtaggcctttcaacaacaccacctttttcatgatactttcaaataaactgctcgcaaataccattagtcctatgcgtactgtaactattggtgtagcctttagcaaaaattaaaaattggtgtgaatatgattattacgtcattatcgtttcattgttgattctgtggcatacccctgccggcgctgctattatatggctctaatatgatttatcagggatcaattgacaaagatgtacatcaacgtatttgacaagctacagcaacttgctgatgacgacatgtctaataggcaaatgcttcaattcgaaatatttagattcattgaaatcttgttctgtttctggtccatgttaccacaagtaatccccagtgaatgtcttgcgagtctctcatggtgtgtttaaagtttaatgcttttggaagactacaaccacaatcccgcaaactacatataaggataaatcaatggggactatcttttcagcaacaatgaccacgaccaagtaactgactggttcagtggaacacacctcaggcctctctcagaatcaatggctcccatgggtttctttaccaaacaaacttgtcccttcaccattgtaaaacacccctaatctaggacgtcttccccctactatggaaacacccttccctttgtactattaatcgtttattttatttggagcaagtaaatgcaattgaagaactgaaaagggatctgtacaatgtacatacatcacatgcaggctcaattcttgcacgactataacctttatctgataattactctaaaaggccataccataaaaataagcatcaaactgccattcactcagatgcatgtgagatttggctacatgaatggcaactgcaaaatgtatggtgaaaccagaaagaacctacttttttatgcaaaaaagaaacgtgaagaaactattcaataagaacaaaacctatcacatagacgcataaaaaatctctcaaataggcagaaaagtgagatagtaacttcgtagttaatccaatatacaacaatgcctttggcatagaggaattgactgaagaacttctagcaagaagattttgcacatagacaaccagtaatcgctgagcaaggctaaaactacaagaattaacaatctaagttgaggttacaaaattcagcaagcaaagtttattattattctcagattttttttctctccaaatttatatggcggtgcaactttaatacatcatcaagggggagggggagacatacagcatatcatggtttcaaaatatgttacaacatatcacaagggaggattggagccctctctaacagatggagacctggaagccaagctcccatcacgaccaaaccttgacacactcctactaacacttctaggagtagccaaagcaggagtagaaccacggtaacttgcccgaagtgtttcatcaacagaagatgaggacttggcaaacgcattcctcacaaacttctgagctgcaggagacagtgtacgcatgcttggactggcactcccccctctaaccggtgatgccaacgggggcttatgaaacatttttgacctctcccgtatcttgcgtgcagcctccctagaaagagaatgtgcctttgaatctcttgccggtgcagaaggaatcttataatgaggaccatcagcactaccaccaatatcaagtggcgtatcttccagatccaacctcagcggagtcccctcaatttctccccaagtaataaacggggattcatcaacacctggagcaggggacggtgtcttaacaaagctataaccattctcagctttcttcccagattctaaataaaacggatttggagtcttcctcaaatcatccaaatcatacttctttaacttatccccttctctaagagacataggcgccggcgtagtgccagcaactggcgcataaagcacctcaacagttccatcatcttttggcctagaatccatcattttaccatgaaacctagtgttcccgcgattgatctccttcgtggcggctttaattctattcgctctttcctcctcggtcaaagggacctcaccccgatcagcaggatgatacattaacaaattcttggcagtgtaattccacccttcaagggtactcggaggctgataagaggttccataaccatcagtaatcctatccctcttcacatcctcaataccctgcacatcctcattcaaatacccaaacctctctttcctcttcttattcactttctctagaatcttcgaaaaactatgattgtcctcactcgtgtacctcctcataaattgatcgaggccaagcgaagtatcagccccaccatcgttattctccccctctttagcctcgagaaccggggcacgggggctttgagagggttttccgtcgaactcatcgagaggtgtgaaatttctaacgaatgtggaaccgggtgtgtgggaggttgttctagaagtatcattgggattggttacctttgctgtgccggcgcggcgttcgaggatcttcaattgggcctcgcgaatgacaacagggtcgccggttttgatggcttcgagccagtcgaggcggtcgcggagcttggagatgtcggggaagtagtcgcgctcgatgatcttctccaacgcctcaacgtacgtgtcctcgtccagcaccgcagggtgcttcgcacacgatgatgatggtggatcgttagggttttgcgccgatacctgggaaattgaaggggacggcgacgagatgtggagcggcgagtgccctggagattgaagcattttctcagggtgaagagaaagattgattgattgaatttgtgtgatcaaaactcaaatctgtgagttagggttagggtttgatggggagaagattctctttcaggttcaacacgaaaacaaagcgagattggaacatggaacagattttctcccaaaccgtgttttttcgttttataaataagtatttatcttttttatcttcacaataaaagtaagtttttatataaaattttatttttttcctaaatacacgtttctttatataattaatattttaggtaattttttagttatttattttttaaaataaaataaagatagtgacgatctttaaccgtcatagtataaaattaattattttaaaagatttaatatcatttttgatctattatgtttcacagttattttactttgatatattaagttttaaaatttttattttggtcttttatgttttcgaaatatatcattatgttcatttttaaaatttaaaagttaacaaaatattaaggtttcgatgattttgttggtaaagttcaaagccgcagtatctatttcactcaggattgagtttctttattaggtgtttttttttttgcctgttatttcgggaggtattcaggtttggcatatgcatgcatgctctgaccaagatttttgggaatgattctgtactccaatttggtgaaggagctttacaatttgaaaacataaaaaattatgatgaaaattttaaaacttaatatatcaaaatgaaataattgtgaaacataataaattaaaagttacattaagaaaaaaaattaattgtgtaggtcaaataaaaaaagagagtatatttttatatgatatgataagcccaatggtgaatgtagctcagagtgagaaaaaaaagggaggcccaaatccaaattgtgggttaatagagaaaaaataagaaccaccgaacgaagacttgacaaatgaaatgaaagcacagaaaggcatattttgtgtgtgtttgtgtcagcgtgtcactttaaaattaataataaactgaggagagagagaggacttttgttcccctttgccttgatttttgggtcaaataaatgaggatgttacattggactctctcccattgcttccttccacccaaacccacaacatagacgacatcttctgcaacacaaccaaaataccctcccttgttttgtttactcaactcgcacttcctcttcaccaattttgaggtctcaattccgggtaagtaatgcttcccacgtgctatctttctccttttatatattccattcaatttcgcctacttcaattcttccttcttcttcttcttttttttaaattctccccttattttaatcttcatatactaaaatctgtgtgggtctttttttctttctaaccgaggtatgaactgttgtgggggtttggggatgcttccacagaaggtggaatagcattttttttttgagacctaagcaatgaaatcctccccctctctctctttcctctggatttggttcggctaatttcagatacaaattaaagaataagctatctctgtaactgttgtgtttgtaattaattggattattcaactagtaattaagacgttaagtactgtatggtaaaagtgatctcaaagtaggagctggatattgatttttgtttgagatttgagctcctttctatctgaaaattaattaacatggctttatgcatgtgtctgtttgtatatagtattgcgttaagactccgatttggaatatgtatgtagatattctatttggtccatcatggctgaaatggtttcacatgtttaaagtgagttttatcttgcggcttctactaataaaagtttggtttttttaagatcagctgttgagcgactaaaagtagaaagagagtttttacaataactacttttttattccaatataaactttccacattttgttccttagaacagggttgacattaacaaaactgctaaaagttcaataaaggaaccacgtatgaaaagaaaattttctcgacccacactattcatattcatgatattgctgtcacagggcaccgaaatttgtgttttgctaattgctttttaaacgtgtcagctttgaacagccacaagcacgcattgcttgttcaaggttcaagccattcatggaagcagttaatgaaactagacctgtttccttctgatatattagaaaaaggttcacatggtttctacagacaaaagtgcggatcaaaatatcccttctgatcaattgcagcagagagtgagtcctgatagtgatacgacattgtcacaaggtcatgatactaaaaatgatctgtccaaaccagaggaagcaacaagtattctttctattgtagttaaaaatgaagggaaggattctgatgctactgcttgtgccttggaatcagatcaagaaggaagcacatgctctttaccacttgggaaacctttgcagagccctgatactctttcgcatgaattgcctcgatcgcagtccagtcaggaatgtccctctataatacgtgaaaaggtatcaaaagatggctataactggcgaaaatatggtcagaaacatgttaaggggaatgaatttataaggagctattacaagtgtacacatccaaactgccaggcaaaaaaacaattgcagcagtcaaataatggacatatcacggattccatttgtatcggtcagcataatcatcctagacctcaattaaacacagtatcaattgagtgtgttctgcctgttgttgaacaagcacttcacaaaccctctctagccaatgtggaaggtgagcagtacactttgtctgtacttttgtttctatgcctctgtaggaaagatcttaatgtattttttgacatcatacatgaagacaaagcatccgttgagcatggatgtatgcctcaacagatcaagcctttacaatcctttcctcctgcaacagtttccccagttaatgagttgaaagctgcacatttacaattgactaaggcaaagaatctggttcatgataacaaggaacctgagtcaaagcggctgtacgttatatcactattttttaaaatttgtgttgatatatatatgcgatagctaacctttactgccaaattgataccaagcaggaagaaagacaatagtaatgctgatgtcactagagttgacatgtcaactcgggaatctcgtgttgttgttgttcagacttcaagtgaggttgatctggtaaatgacgggtatcgctggcgcaaatatgggcagaagctagttaaagggaatacaaacccaaggtacatgttaacttttcatttcaaaatgcagtcctattttctgctggtgttgtgtgtgttagaatgtgtttatattgatccatattatatcattctgccttggaagagctagcctgaagccctgtgagttgtgactataaattaatttcattagcttccagtctaaagatctgtttgagttattcttcgccttcttgaaaccaacaggaagtgattatagtatttccttttatatcattttcaaagtgtgtcccacatgcacgttttgtaggattataatctgtggctaatacttaagtccgcacaactaggtcacactttttatgggtttaacaatgatttagcagttctaaccaggtattgaaatgcaacccaaactcacaaatgtttgaacatagatgaacaattttattagaagtattgtgtttctttagcattttaaaaaagcaaggcaattgtatcaataatgcttttgttctgaactggtatattcactatattgggtatctgccaatgaccgattcctctggtctaacttcaacttcttcatctgctggttacatttgtcaagttgcctcttctcccactggttacactttttttagatgtttatttgctctctcagcccctctatgctgtgcttacatggatacagtgttcacaaatgttttaaattaatttgactgcattttctctccactcttccagaagttattatcgatgctcgaatcctggatgccctgtcaaaaagcatgtggaaagggcctctcatgattcaaaaactgtaataactacctatgagggacagcatgatcatgaaattccccctggacggactgtcactcagaatgcagctacaaatactcgcacaacggccactaatggcaagccaggaaccaaatctgagggtaatactgatgatacaggggacctaattggcgagtcgactactaagtcaaaggctggtgatatggttgagtttcgtgtgatcagcctttctaatgagggtcctgaaattaaattaagtgagcaacaacaaaaggataactcagctactaaagacgattctgtcagcaatgacgttatatgccattcaagttctggagttctgtgtagatcaaatgaacagctgaaaggtgaggtaaaacctatatcagaaggaagtaaggattgccttaaggtggttgccgttcatgatactcctagtacagaaagtgaatttaacaagcaatccgcagctgatgaagaaccggtccaaagctaaatttgcaatatttttgaaagggtcacctagttacagaagagtataaatatttgacaatgacataggctttacagatatactgtgggattataattcctatttcgactctaaccttcaactcttcttctagctctctgcttgtctttgggcaggttgactaaatatgcaaattacaattaatactacattggaggatatcataacttgtataccattattatttgagttaaataagatttacattttcgtacacatgtatctaatattctaatgtattgttgaacatactcagctatttgcatgtaattcttgttttgtgcctactaatgctttaatcttcctttcttccatgtaaatttacaaaatgcgttgcagaattgcagtaattgagtatagcaaaagttattccatatgttaaaatgtgtgattgttggtgcagtggtttagattcattctttaatgtaatgatcgatgctcgactaaatataacaggatattggattggtaatttattatttatccaagggtaaaataataaaaaaaaaaaaatctgggggttggagcctggaggtggttcatttagatagccactcctctcatactttgtccaagcaaacaggataaccaattggcgtcaaggttggaggctgagaattttatgggtccatatccattacgtttatgctcattcttggtgcagtctatgcttttgggagatagtgcgagggtctcttcttagacattatttgtttttggagttttacctctttttatattgaattaaaaataatagaaagacttgtaaaccagagaagaccttcctgaaaaatcgtctatatttttttgtgtcacgagttgggtactaaaaccataaggatagcttagaatctcttttctgttttacgcaattatcttattaggcactgctattattttgtcaaagtccacctttttaagtcacgttggaccatgtcaaattgcaagaaattctttcttccttccctcaccaatagacatgcaaatgttgaggtccaccgatgatgcaagtcacatcctaatttcaatggtataccactttcctgttagaagaaatttttttatggagaaggacacaagaattttccttaggagatataaggttgactcgatggttaaagaagggaagaggaagaggtggggggttcgaagacgccaactgcatttctaacaaaatcaataaattaatatttttcaataaaaaaaaaaaaaatgttctgtcaggttggtccaccagagcaacgaaacgatcccattgccacaaaccctcgagtacgcagacccagaatggaaggagtgattgtgccaagttaattctagtcccattgcctactcctcccccacagaataacgataaatttcaaagaatctgatacagctgtgtttcttttctttcagtaaattactagtaacttatctttcttaaatgaggccacgtgggttattttattaatttaatcttaacacttaaaagtaaaatatctatctatttcatctaataaagtgaatggacagcaatgttggaaccattgctaagaaaagccactctactaatattctaggaaatcactttccccagccactaataagccaaacattgagggaccagaaaagattttgaaatgaaagattaatattgctgataaagaaaaatgctacatacaatttcaattgaaattcttgaaacacagaaaatggacaattagattggatttaatgttgagacctttctcattaacttctacatagtaatggaacagaaaaagaagagggacatgttatgcttttgttccccctcgaacattgaggagtcacatattgcccagttctcatttccaagcgcaagaagcaaccaaatctctattcatccaacccagataaagagctccatctctctcttcaagtctatatctataactgtagttctcaagcaatttctttatggtaccattcaccaatgaactcaaagggtaaggagtgaaaccggccattgcaaatcttgacctccacttgccaagcacctcatgtcgttccaccctctcaaccccttcacaagctatgatgttaaccaagtctcttgccaaacaatgctgctcaacattgattctctctttatgctctctgggaagagtcacatctattgactcaaacattgctgtgtaatagttcagagtttcaaggaaacgcggaaagaatgcagcagtgttcgtgttagattcttgctcaacaagtgtcaccacctttggtgataggctcctaaccaacctcaacagcctatccctgtgattctgagtactcacactttcatccggcatgtaatgtaacatgaatgcaaaatttacagccagagcttcccctggtcgaactccaaggttatgtagttgaacatcacaacctgagatagctgcagcatgaaattcaaatggcaccttaaaatgctcagcaagctttgataacctccgtcccactatgtgtagtccaccgccgcgagcataagccgatgttgaatcatcaatacctgtaatccggatgtggggtggccctccaggtctagctgcaaaagcctgaattaaagttatccactggcttccttgaccaatttggaaatcaattatgtgaactctgtcttcatctttcatggcttctgcaatggctccatttgcagacatatacccaaacttgaagtaggggcaaacctcatacagtatgtgcatgtaggagagaagttcagcactttctggttctttgcatcttaaagatttgtatattgaactcccagaggcggccaatcgggcaacaagtccttccaacatgtatactcccaaccgttgaaccggatcaccagaaactgacaccacctgccttaattcatccatcagccattgtgccattagcaaatcattgtctgaaatggatttggcacatgcaataaggatgagctttaggtttttgctagaaattgccaccattgtttgtctccaactgtccatctcaagtggaacgaagttgtttccattgttgatggcactgtcataactatcaagattatcagagtcagggccaagcattacactttccaactctctgagcttgtgcttgaagttgaagctgcttaaatcatcagttatgcaggagccactcataggagagccataggtattctcaggggaatgatactggtcaggtggatatgactgagagtcttgctgcgatatggggctgccgttgggtgagaaactaacagttgaaggggagttgtaaagagctacagaagatgactccaaagtgcagtaaagttctgaagaacttggagttgaaaagtgagtaccatggcctccatcatggtagtatagctgttgatttcgagtctgatactgcggcaagcagtatgcttcaatttgttgtaatggttgatagtacatacttgaacttctatgttgctctgatgcctgcattatagaattgacttggtctcaactgtgttatagtagttcaagtgatctcttccagcagattatatgaagaagcagaacaatggacaatagtggcctagagaaagctgctaattgatactcatggcaacaaagatatagtcctgagttgtcaaggttctctcttctgggaggttataaaccacatatttgacataatctgctgtctgcgtggaaaaatcacaacgtcatcagtgttatcatatcatcaactttcaacttgcttccaatgaattgaagagatagaaagcaatagctgaaatattcagttgacaggaaccagaatataaggacaacttttttgtcttattaaagaaattaggcactcttcagggtcagcgcactgttaaaattagtttacttttttcttctccttctaccgtgtattatcaacaacttgactctcataccaagtcaaacaattcatctctctgcctattttcttttttatgacaaaaaatgaagaactgatggaatcaattagaagaatttccaagaaacttcataaacgaccaattctaaagattattgatttttctccaccaaaaaagaaagaaaaatacttcggaattgaacaaagagaagggaatagatattcagaaagggaaagggaattatctaaatatgaacatctaatttccattaaaaaattcaaaagatgagacaagcagaactatacatggccccacatattgtattgaattagttttcatttgaatgaagttaatcattctaaaaaactgcagaattaacatttgcatacggaaaaaggctcaaccaaatctaatgaaaaatataatttttataaatcacagttaagaaaatttccaattctactagattaactaaattcacttggctgagctgaaaagaagaaagcttgaatgtcagacagaacagattcacaaaccacaaaagcagtaacagcaattggagaagtgcttttattttttttctttctgagtttgatgaagttacagatgttgttagctgacaacaactagttaagacaaggttaatcaaaccaccccttatacagtactcacacacacatatatatatatgtgtgtgtgtgtgtgtatcaaaacaaaatttgtgcaacaagcagataggttcacagaaaaatgcacatcaaatcaaagctcacatctcattgcagaagttggttaagaaacaattaaagagtacaaaggaaagtttgacatttatgcaaaaaccattcacatcataagcagaaatgctaaaacactagaactcaaaaagttcatgggcaagaagtattaacagaatatgttttacttcaccaaaccgtttggagaaacccttgtaaatcaatgaagatcaaaactgaagcaaattttcaaggaaaatatgaagccatgaatgaaatggcttcagtttgagaagtttttgaacataaaaccagtttcttaccaagtttcgaggaaattctgaggttggaaaaccacagaggattagaatctcagagcttgggggagtgtagaagacaaggctattccaatggagaaaaaactaaggcatatgcatataaaataatgaaggagaaattgcccttccattattatagaaactacacagaaaccattggctggtgttattaatgttaatatgatgatgctcggtgacaactcttttttattgaaatgacaggaataccccttgttaatagtatgcttggtcaaatactgccatcaatgccactcttacaaatgtgcctcacaatcacacgtggcccgttttgagtgagttagcatgagcagcttcacttcaatttccttttcagtccatctacttatctattcattttctcttggacctttaatacctatctttttcaaaagaaaatatgtagaaaaaacaaatacttgtatgtttaattttttcttcttcttgtgcacaattgagtagtatcatacatccaaatttaactacctactgctacaaaaaccgtagttcagtacttcatttcatgaccacaccacctcctatatggtttgcattaatgacttaccaactttgatgccaatttggtgactaaagacataaccattcaacatttcaacatacagaagcataattgtatctgcatacatgaattgttttttgtccgaaatgcaacgctgcttctacttcaatgatcagtaaattttatcatttaactcaaatcaaattaatatcaaatgccgtattaaactgttcataatcattaaacgtttatcatttaatgaaaccaaattaaatccttttcactacttagacaactgattaacaagttattcattacttatatgttcactcaaacatttctctcgttttttaaaattattatttatatatttgtcttatttcacatcgtgaaaatcattgctgaatacggtattgaatactgctagtgaagtttaatttaatttgtcaaccaatgataaaaaataaaaaaaaaaaaacctcggccaacaaacttaagttatttgaagtaacaacccccaaataataagaattaattatatagattattgtttaattattatagacaaatattagtaatatacaattaataatgataaatgataatgactatccagggtggtttagctggaccgatatctcttgcacgacatgtatgagcaacgacatcagtgaaatgacatgctcatctcatcttatcggtcgattgtagttaactattattattagctacaaaaaatggtactttgtgttataatagcttctgttatagttttgaaaaacgagtgtatttttctttctgttggtcatagatggacaatacacgactaggaaaatccattgtcatttgaccccaaaccattgatacattaaatagaaattcgagtgtcactgctcaatataccatttattctaccactagcaaaatccaaacttatctctgatttgagaaaatttaagagtaattgtttagatgaaatacagtggtgcagtaagttgtttgaaaatcaaagccaggagtgatatttttccttaattctttcaaattgaagctgagaaatagtttgacatgaaactggtgatagatcctcacgaattaaataacagaaactaagatttaaaggatatttatctttgccatagtttgctcaaagaaagggagactcaacagtttgcaagtgcaattcaggggattgcagtagcatgaaataaaaatttcccatttcagttatttggaggatggcattattagcacatcaaaagcaagaaaataagaactagagatgaatgaaatctgaagtcttgagagaggattcacatttcacactggaaaaagatatcgagcaatatggtatttggtcttgtgaaaatgaaatgtgtatatcttagttgttctctaattttcaaacaaacggtcaaattttgggagtgattgttacaagtattttaatgagaataataataataataataagccgaaccaatataggttggtgtggtgtccacacttttaatctcaggaaaaccatcatccgtgaccatctatgcaagagaaactgatataaactgcactaacttcgaagggatcaaaggtatatagacctaggttatacggaaagaacatatgtaaccgagtgtgacacaggaaaccccacttcgttgtagattatgttatatatagtaattaaatgtttcctactttttgcttacctcacacacaacaaacggtctaaaaatcatcaatttaactcctctaaagtgaaaaactatataaagtgaaaacaagaatttatctactctggattaaaattaaaataccatgtaatcataacgtatttttaattaaaaattcgacagtaaatgcgctcctactttatcactttagacacttttttcactttagaagtgccaaataatcagaacctgacttatacaaaggtacctgtctgcaattaaatcttgagaagtgacaaatctattgcattcataagtagtaattatgttggatcttgtgcatgcatgtatgcattaatctggttagattcactttttatttcaggtgcttctatattttatcttagcttgtgccaactaaattagaaaactaagataaagagggtgtcagcaaattaaggtcgttttcgtaatttaacgaccatattatctttttattttcaaattatatcgatcaatagtatacataagtcatcagtgaattgttgagattaaaaaggtagaatttagatgatgacccacaccacacggttgagttagaacttagaagagagagaaccgtacaataaaggcagtggcaccaatgatgtaagtagtgccttacacttcagctaacatgcacttgatctccatttctatcaaatttagtaattgcaatttatttattttttaaaatctgtacatttatttatatatgtattttgcttgttgcacttattctctttcataatccattgaacttatctcagaaatatccaattagaatctctaaagctttaaaataatcactacttcttatcctaatccaatttgaagttataatgatgcagcctatggaaagttactgctaactcaaattattgaagagtgcacattcctggaggatatctttcataattgcgtcttcaacttattaaaagcgaaaaggattgggcgataactgcattaaggtaggtaaagtgaattttcataatcggtgataattaggctttagccatattttaaattgttttttataatgccaaattcagattttcctgtggtttgtacaaatttaattataagaagcatctttacaatagattttttaatacaacatgaatgcttttttcattttatattcatgtacccaatgcacactagtacgaatataaataatttgactattaataatagggcttaggacaacatgtatcaactttttggaagattgttaataaacaatctgcataactgactttgaatccacgttgtttcaaatcccaaatttaaaataaactgactattttagaagaaaataaagataaaagacaaagcaaagatccactcacgactgtttatattcctatcttggccgtgctactattatttattaaggtccaccatacatacatacacatatatatataaatatatatcactttatacgcgtgctcttatgatattgttagatcatgttcttaatgaaatgctgaaagaccaacggaaaaaaaatgcctaattctttctctagaaaccgtaaatgaataaaatcatgaaggatttttgttttttctttgttatagtcagatattacgtgaaaccaagtgtcaaattattatgcgtccattgatcttacaaattataaagctcccctgccaaaacatgaaatagtctattgatgtaatttagcaagtagttttaccctttaaatatgctttggggaatcaaatgtaccaaagaactaaaccaaaaaaagaagaaagaaaagggaatcttggtaatactttgtccagtccaaagtgagtgaacatcatggcccacacccttacctgcaattaaacctttatttgtcaattgctctaatttggagttttgtgtttattctggtgtgcgccagcgattttgtcgaagatctacatagagagcaaaatgttatttatttgacatatggtggagcatatgtacttaatttagcttctaggtcaagcgaagatgatctctaatctctctcaaataattttttatttgcttttatggtttgcatctgagttccagttggacaagaaaaatgacacgagatgaaatgaaagtgacataagccatttcgccatcatcgattgtttggactctaatttgattccccacatttagatcttgatatcatgtcactgattgatgtaaaataattcttctgtcttagatgaattggccgaaggatttgaatatcaattgagttttttttcttctttttttttttttttggtgtatatagaatatcaattgagttgaaaattgctttataaaaaattgagttgaaacttaaaagataaagcatgattaaatttcagataaatcttgaaaaccaatcaagttttaatgaaatgtaaaaaaatttaaaggtgggtaaaaatttattttgacaaatttaagggaattctagaatttggccaaaaaaaaaatggggcaaataccaaaccgtttttattttttgttgctttttgttttgtttttcttttacgattagcttaagtgaatatagggttgaatgagacttcatataaaaggcataaatccgagtattaagaaatgaaaagaaaaaaaaatgaaaggatgaaaaggaaaaagaaaagaaaaaaaaacttagttatcattttataaaaaatgccatcacgtaattcttgctgaatttttggattggccttttgaagttaggatggagttttggatgttctttgctttacgcctggacttagggccatcaatcaactttctgaagttggtctgttgtttcaaatgtttcggccttcaagtctaagtttcttacccttatttgataataaatttgaaagaacaccatatataatagtttgtttcaatatttatgtggtggaactcagagtttaaaaaaaaggtttgcttgttattgtaatacctttgttgttttcttaatatttataatagtttaatttgatttcagcactgataattttttttcaacaataacgactcaattttgttagttacaatactatggttaaaaaaagagcaaaagtaaaacagtacatctatccttgttatccttctttaatgtacttcattcataaagtagtataaatctaatcaaaatattaaagtcgtctaacaatggcatgttttaacttcaacgaattgaaactccctttcaggtccataaaaacagagtaatttcccctctctacacatttcaccatggttgactgcattttcattgttgaagagttaaaattatttgataataagagataaagtcttgggaatttagtatgatataataagattagaaccaacataattaattccaaatgttaattttaataagtcaatgactcataccaaactagtataatttaccattactcttcacttttttgtccaatgtaatattagtttcttctatattacttcgcatctcagacgtggacaaaacaaaacttgacaactaccacatgactagatggtatttatttgtcatgtccgaacgttaggagatgagttctatgattctatctcaacaactatttccacaggctcacttcatgtgtagccatcgttatgagatctgtttttcttctcccacgactttcacattgttgtctctgtacaatatctggaagaataagaagatacgtttgagcttgcaaaaataagacccaaaacctaagcttactggtgaatgtctcatcccctacattcattgttcaattcttctatttacataaaattttaaaacttctttattttagtacattatcatgcacaaacatttacctataaatcattaatcttatcatatggtaaaaaaaaaaaaaaaaaaaactttaccacttagtgttaaaaatgagttgaaatgaatggaactaagtttagctcgtctctttttaataaaaattaatttggtttaaaatttaatttgagttcaatatatcaaaatgatgagcagttggagacaagaaattggtagatatctcaatcaaaagggcaaaatgcttgcatctggccatggcaatagaatagcactttaggctagaagaccctataacttgcgtgccttacataggggaatgtagggctgcgtttgtcccccactcccaaagcactaaaatgaacttgaactcttagaatgaacttgcaatactgttgcatatgcacgattttctacttatttagtatatttatttatcataattgaatttatttgttttcagctagatgtgaaagtaaggaagatgcgttggtcgaatagtagcccttaacattgaaggcgttggttaaggcaggagcagaaatacttgtgtgtccatattatacaatatgcatacaagaaacggttcacacacgttctactacaacctacaggatagcgaatgagagtattcgagctttctttgagaattatgttgtacaaaacttatatataattctataaatactgtttgtattatttgctaattagaattagagttccaccttactaatttgtgttaaaaaagtttgtattaaaaaattatgtaaattattgagataaaacttcaattctaataaaaaaacagtgcaaacaacactgaagcaaagtttttttttcttccatatatattctacacactctaaccaataatgagtgaaatctctctgctaattaatgtccttttagtgcgagtcatgcctaagttaaaagacaatcagacctaatgataaagtggagttcattttattaggcatgtgacatattagaaattaaataatcccttttcttaagtccataaaaattctccacgtagcagttttcaataattgatcaattcaattcattcatataaatgggaggtttagagtaaatttcagttttgactttttttaaaaaaaaattagaatatttcaattaaaaattaaagattaatctcttgatgtattaaaatttatttaagagattgattttaatgtataaacaaatgttgttttataaacatacatatctagagatcaactcctaactatatatttaagagacataattatctatcaattatatcacatcatatttttttttaactaattcatttcccagttatgcttaactaaacaaaaataatatatgatatgcaagtttgaagctagtttaaaacctaacagtaacagtaaaactttgaagatcaaactttaatgattaaccaaactgcataagcttatcaaaatcaagaggggctctagacattcaagttgttgtcagaaaatcttgatcaaatagcaaaaggttgtccctcgaccttggcatgccgattgtagtactttaggatgcagagtcttgtaaattgcatacttaaaagacaaaatgtaggccttgctgataaatatttgtcccccgtttccaaattcctaaaatgaagctgaactcatatagagtgaccaatgtttaatacacacactcacggtagctgctatgtggggctaggcttaaactcggtccaattacatttctgaaattttaccaagtttcaggagtgtgtttcaaaaccaaaaagccataatgagagcgcttgacttttgtattcagttttgctgtcatggcaccgcccatgtaaggccttttgggagatacattaccttaatgttctgtcctttttcatctgcagaatttgtcctattcttatccaatcaattaccaaagttgcagattttgtaaattttaaagggtttacattgttcatcaacatgttctgccatgcattttggccaacatatgggtccctcttaccacatgtgcccatctttaatttggaacatattctttactcggacatttttatttgttcctgacgcggcaaattccaattgggatgtgtgtagtggaggagtttgcatgtgtgtatgttccaaatctgattttgggttagccttttcctttctcaatttcaaaatcatccaaatccatcactccaaataaatatttttaaatttacaagttgcttaatgctaaggcatgcgagggtgtgtgcacgagttatacatatatcaaatatcaaattgtctatttttttatattgattatccatcttctctcttttgtgtagcagtaaagaataaagacactagctcctacgaaaagcatattagccgaaaagcaaatgacacgtttaaaccctatttcagagggaccaggtaagcaagtacttgatacttaattataatttacgttagccaacctatattttctctaaactttttggctaccttcttgacacgttctttgttgataataagtcatttttctagaattgaagtttcattaccaattaccatatataaatcgtcaaacagcaagtcagagtcagttatttgatgagggcattccaacacactagactaaaagaatttgtttgacaaggtctctttctttcctttaaagttctaaatatttgggaatttcaagttgaaatattggactggacgaaatgaattgcgcacttgtcaagcatagtaccaaattttaactggcaaaccaaaccattttttgggtcaatatcatcaccttatattccctactcaattttcaaggatcgaatacgtttgatcaacagaaatactaataagtttacaatgtgaagaattagttttgaataaggaaatttataattttacaaagaatagtgtgttttgactcctgactcgaatcgaataactccataattaagacatgcttttggtaagattcctgggctaggattactcctcaattaatgtatacttttggttttggttttggttttgtaatttgtctgatgtcttaatcagaatgttggctttatttaatttattcaaatgcagagtcaaccaaggactttgactttcgaggaaccatcctgttaattctaattccaaattctaaacagagaccgtagaaagctttgcccctcaaattatattctggttgactcttattgcagggcttctcagtttggttccttgagtattgaagaaaccatgaaaattccagaaatataagagaaaaaatattacaaaggaataatagtgttatatatatatatatatatatatatatatatatgcttttcctatttttgaggcaacaaagggattaagttctttgagtaataaaggatgaaaaacctaacttacatggcatggcatgatgattctaagagagaaaaataaaatttagttaaggactagtttggtatgataattacaatgaagaactaaataattattccgagtggccacgtaattttgattatatgtttagtaatagtattattggcatgaacgactatttgcaaagagtaagtaatacgaatcaatatcaaccaataaagataagtagagagcgaaaaaattatgttgtaaataaattacataagagacattttatgttctatgcatgtgttgttcggaaacagttttgtatttaactagttaggtgacccttgtcatgcatgaattaattttgtttaatatttattttacaataacaattaaatatgtaatatgatacatcattaaatgaaatttaaatatgaacacagtcacaatattatattttataaaaaaaactagaaaaacacaaattgtgtatatacatacttgcctcaaacaacataccaaatttttttattttccaaccattgttattaccaaatccatcaaaaaatacccccaaaatacataaaatattaaatacatatttttctcactttatactcacacataccgcaaccaatatcttcgcatgcacttgtaggatgttttagaattataagttcattgcatccaaagctctccaattcttaatgtaactcaattttgtgaactacatttgttgtttgttactaaaactggctcatgaaacctgcatcactactcattgcatctcgtaaaacttaaaaatatatcgaaaaataaaaaattaaccttgaactttgattaaagggaatatcaggaaaaaacataatcaagcattttgatgttggggtcaaagggaacatcagaatttagatggcttgaatttaaaaatccattttggccttcaaaatcgcataattgaataacttgagtagcttttgataatgcaatttgatagaagccgagaggcaaaaactacaaataaattaaaagataatatgaagattaataaaacaaaggaggtagaataaaaaattcaagaaacgatacataaatgaagaaaagatgtgttgcctgacttcaatttgatatgcttaaatgcctgaatctcaaattcaaattgtcacaaaaaataatgacttagtgaaatatagaacattttaaatgataaaataacttaaaaaaagaactgaaaaatgtagaagtatcttttgtttctcatattccaacatgctccctcttattgcttgtggtttgtacctcgtcttattaaccctaatgtcgaagcatgccctacaatgttggattgagatgcagttggcgatgtgacaatcttgtggaagccaatgtagttagcttatttgaaagaggcaaaaaaatgctacagagaatttaattgaagaaaggaaagggatgaagaaaaaatggctagtacctccatggggtgtaggtgaagaaaactcactagagcataacacaaagatagaaagaaatgaaatgagttgataattaagggtgttgggaagaaaacaaagcatcaaatggaaaaaggaaggtataatgtgaaaaaaaaaattcattgaatgcataatgaaaattgaagaatcaattaagaggttgaagaaaattgaattgatgaaataaggtgagacgaaaaaaataataacattaaagaagttgaatgattatgagtactcatttagctaaatgtgttggcattaatgagcatgaataacaaagagtttttttgtaagttagaaaaagaagttaaagagtccaaaacaatcattcaaagtagtttaataagaataggcaattatgatgaaaaattaggaatcataaataattaaatgttagtagagaaatatggaaagacaaaaaagtacgagagaaaaggaggtgaagattttggagaaaaaaatttgttgaagaaataagaactattacatatataataaattctaaatctaataatcactcttagtgtatatttgttttgaggggaaattttttatttgagtaaatagttttgttgatatcagctctaaatgtactttattaattacaatgtaaaatgatttttacatttctaatataataaatgtttttcaataaaaacttttcaaatttattttcttagcatcaattttaaaggttaatgtttacaaaatcattattttaacttcaatatacttaaggtatttttttactaaatatttctactgatgcagttaaaagattaagggtgtgtttgaaaacccatttgatccacgttacggaagttttgcactttccacggcataaacacagaagcaatttagcaaggtctgtgttgaattagcgttgaccgggtttagttgaacccaaatgatatttaaacactcactaaccctcgaactcaaaatagtagttaagtaaaggcattttcaaaaataaattcagctaaaactaacccatttttcgttacaaccaaactctgttaagtatattaaaagaattgtcaacaaagcatgatttcctttttgatcaggttaacaaacctttccaaataagtactttttaaagcttaactccactgatcaaagttctccaaaatccaaaggaataaataatacttgtaagcccatttacctattcatgggctgtacttctgcatattgaggcccatttaccttttttttatttttatttttatgattcttaaagagtaaaatttatggagtaaaaaaacaaactaaaaagagttaaatttgtaatccatccatttttatacgtaaatttagattagacttactatttaaagacataaatgtttctgaaaatataacagatttaggtaaaaatttcttctctaaaaaacaggtaaacatttctcaattaaaatgagaatgacactcactttatagaacagcaaagaattctttctattcacttcctcttggatataaatgctttgctcatgaactacggttaatactgataaacaaattaaggttaatgattttaattattaatcaactaaaaaacaattttcaaatataaacaattttagattattatgacaagttttctattgtaatgatttgaatgtgagggacagagtaatatatgaaaacaaggacaggttgtgcttaagatagaacaacttcgtgccaacggtaccaatacactctttgatccacgctttagtaatatattaaagttaattgtttcaaatgtgagggccagagtttagatcattacaatagaaaaatgaatcttcttttctgttctgttccttaaaaacagatgttcagtaacaatgccaaatatttgatgtatgatcaaactctctctctctctgaagatgcttatgaagatcaaaaaactctagaaagacgatcacagtacccaaaccacaattggacgtggggtgtgtgcactgtgagaatgaaaaagagagagctagaatgtgtgtatcttgcacctttggtgatacttctatttattctcactgacctgtgcaaaataagggaaattcttgcaattcttgatcataatctttaaaagatgaaccatatattatcaatattcttcatacaaatattatccatgatcttctcttgattcggataattatttaggaggtaattatcccttgaagtttgtcataaatctcgttgtgctgaccgtactgggcttcttggtatttggcccaatattactcaaccttaacacactctttaacaatatattaaagtgtcactgtttcaaatctgaggagccattctttagaccatcacattagaaaaaggaaacttcttttctgtctcactctttaacaatatataaaagtgatttgtttcaaatgtgagggccatagtttagaccattacattagaaaaatgaacatttttctctctcttctaccctagtttttgttttcccactgattaaactttcaattctagaatccaactctcgataactaactcgatccttctaccttgattcacaaattgtcatatttcaatcgtattccttttgaattattagaaggtccatcaccacggtctaattgtcaagtttgaatttgaggagatctcctacaattcatgaatgaaatggtccaaggcccagcttggttggaagagttcatcaaacttacatttaatcacaatttatatacaaaatagtctttcgaggatgtttgatgcctctgctcattagtcattcctccataactctgccccgaacctatgtttacacttaaaaacaaactggtctgcaaaaagacctaattttcaaaggttgaaccagctaaattcataacttctaatatccaccgtctataacaggtcaaatatttttcatcttgactgctcgttaaataattaatattccaccaatcacaacaaaagtggtccatcatgaatcactttatattagtccttgttaagtgcagctagagataatttatactaaaaatcagtatcattgaatagtaacaagagtgacgtgatcaaactcgtcatcacttaatgtgtaatgatactatgttaagaatcaataatcctaaaaaattagagattttgtactttgggtgcataacatgggtagaagaatcatatcctttttcaagttaaattttctgaatataattcacaattttattagaattttttttagtagtgatgcccaccaagggatcgtatagaggggcaagcaatgttggtccaagatgaatgcatgccttcttaagtcaagcagcctcccgggtttggtccggaacaagtatacctgcatgtttggatgcacgtttaaaacaacttgattcacgtcttttgctctatttgacgtggaaatcctcttatacaaacacataataccttgttaaaaactgagttcaattgagctacacgtacattaatgtaggaaaaacttaatttagttttgtaagataacaagttagtttgctagacaagattttattatgactttccagcctttgacctagatcaagtgaattgtaagatttcagcactatcaataatacaagaaaaaggccccaaaaaaattgcttgattgggagtttgggacacataaacacacaaaggcacgagctctagtttttgctgcagttattttaagtcttcattcacggttgtcatcagggaatgaagtcatagtgacaagaaccatgacctgggcacaaacattaagcaaaaaggttataaatcaccattattcatacacttttctgtggtgcaaaacttaaataattttaaatcgggattgttccaatccctgacaactgaaaagggactcgtgtgtggaaccattttcatagaccatttattgtgcagaacggagtggcgtaaaagcagatggaaggaaaaaagtgtaaaagaataatttcttcaggttataatatgagatgagaaacactatttatgagattataaagtataattgttcatcagttgattgatctaaaatttgtttagtgagaatgagaacattactcgtgccaattcagttcaaatttttctgtttcacgcacgcttaccgaagtagtttgaatgtagtttaaagattttggatttatttgtaaaatctatacttgacagattaaccttcaagcatgaggttcatttaaattgcactaattgactctgtcatgtgaacatgcattatgtcctagttaaaccaaagtaggaaataagtgagtggttatcaggaatctatttaatacttactaggatccacttctgttgttatggcagcacctctgaagtggcaagaacctccactgtgcttgaacttctgatagtagctgttgaaggcataagaagcatggtctttcaatgtgtttggtaaatagcatggttggtttacttgaattttgctacaatctgcaccccctttcccacaagcccaatccaaggctgcctgcaactcagactccgtggtctgctcatcagctacacaccattgctcaaactccgcatacgctgcatgatatgtagtttttaagatgaacactttgttgaggatgaatatatatgtacaacatctaatctatcatgtaatcaattttaacttgaatgatgtattgctctttattctcattattataatctcataacaagtccaattttaatccagaatcttattagattaactatttaatcaaacggtaaatatgataatgaaatcaaaaaggtttttttcctcaatggggatattttttttatttatttactaaatagggtagcatttaaaaaaattaccatttggggttctttttattttcacgactcttttttatttaaaataaaaattggtcgctaaaaattgcgataaaatattgtagtcgcataaaacaacattctatcgcaaaaagtattagcgactgaaatagcgactaaatttttagtgactaatttttaaccatatgacacgacttaccctcaaatggtaatttttttaaatactgcccccatttgataaatgaaaaaaaaaaaaaataccccctaatggtgaaaaggccaattaaaaacaatagagggagaaaagaagtaactaggaacatttcaatgttttcatttatggagtagaggaagcacatttcgattacctgttttcggaggaatcatgaacaggaaaagtagaggaagcaccaacttcagcatgaatgttgccatttttggagaaaaagataagagaggctttgctgattgataaagactaaagagtttataaaatagataccaaagatataagcaatgtggttacttatatacatagccaaacaaaaaggcaaggaagttatgggtctctttctaacggctaagaaggaaatttatgttattctcttgcaagtggatcatgcagggttggtcacattgaaattggggctctcccttgagaataacatataccatcattgacagaaagaactgagctgtaacatagcaaaagcttatttgttatttctgacgtcgctgctaatttcagcggttacactttgtcacgtgctccacaatcacggaaagaaaaacacacataaaagacttatattcttaactttctctgatgtcagacgttcttccaactcaacaaacgatttacctttttttccttatcaattacaaaatgattatttatctaccttatcttccctttccccacactcttctgttttaccaccacttctttttttgcctttttcaatgggaaaaaagtcttggttcgttagtggtcctcatgttctactgtatctcatttaccaaaatctgtagccttgtagctcaatattcaactttaatgaattgaacattttttggtcttgacaatatttaaggaaaaaaaaagttacaaagtgacaagttggaatcttacaagtcacaaaatattgttacatatgccattctactggtatcatgtaaataattttgatttacatgttacttacaaaattatgagggttcaaagatctgtcattcctttccatcttggcccccaaaaaatgaaataatgatgtcgacactataagatttttatcttatcctactagctccaaatataaatatttacaaagaataataagagatgggaagcaggaacaaaaacggggtatgtacaccaaaacgcaattatgccttctgttgacctcctcctgtcctgcaataagtgataatatcttgaactcgaaatcagcatcctggaaaagaagaacaaaataagaacaaaatttattaatgcgggaataggcttatactcttattaaactcctataatggctcaagataattgaattacaaaggaaatttagaattgtaacacatgtatatttcaatgatccatttctacttgttaaaattataataaatatatatgtatgaaatgcgcttataatataaaaatcctgggatgataaagatggtacttactatcactaaacaagaccatagctgagatccatgatgctgaatagataactttgatgctggcaagcagtctcaattaggaacacatcatctggggcatgtccaaccattacaatatccggacataatttagccaaaattaatccatccgctagctcttttaatggaaaaccaacaaatggcattcgatgataattgatatcatactacacatcacagtccacacttgtcagcaggctgtctgcactaattatcaaagatttcaaacttccacactatgaatctgacttgaagaaacgtgccattgctatgtagagcttctcttcttcaaatggctttgacacatagtcatccattccacactttatgcactcttcattggaagactgagttgaatctgctgtcattgcaagtattggaatgtgccaataagggatgctaccaaacatctctgcagatgcttgcccacacgcaattttctcatttacctcactctcaagacaacggatttgcctcgttgcttcaaaactgtatcatttaagatgaagagaaatacttgtaagttatatctcagccatgtacccagaattccaggtgtgagatcctatctagaaagcactcagtaatctgttatttcttacacaagttaaaatggccatcgatcacacctaaggatatcatgatagcatgcagattggggaatttataaagtttcttatatacactaactgagcccccaagaggatatttcttacacaagttaaacgcccccctagaggataaaaaaaaaatcacaagatagtttcatacattctaataaaataaataaattacaaggcaaaagcctaatcattatatctatttacataagattgagtggacacttttacagtttaacaacacggccatgaggcccgggaaaaatcagtcgtggttaaaatattctaggtagtaggttcttaacaaaaggaaataagggtaagggcctgacttttggcaccagttcctttaattattatctactgtttttcacgtgttttctctggtacaaaataaacttactagaccagtcattgctccttggttctattcttataggaaagaacagtgtctccatttgcattcaaaattgagaaaactaaaactaaaataaaaaataggaataagaagatatgttacccatccatttctggcatttggagatccatgaaacaagcatcaaaattatgtggcagtttaagcatctttagagcagccctgccactctccacagcagtaactttagccccatatttctgtagaacaccttttgcaactcttctgttcactgcattatcatcaacaaccaaaatttgtttgtcaattaataaattcccgagtttggacacttttttcctatttactctcttgttttcagtgccaagggatactctgtaacactgaatcaaagaactaagccaaagaggcttcatcagtatatcatctataataccaactgacttgagcccatcctgttcattggagctaaggtgggtggccaggagaaaaatctttggtaaattcattggatcccctttgatgccattctgtctacgtttcttgattgtgtataagatatgacattctttatcccaagcatccttgtctataagaatcatggccaactgggtcgacatactgaaggaacaaaaacagtagtagtaatttagcaaataatagcctattgtccagtacaagttttttttttataaaaaaatcaacaaatataaactagaaataaaacaccatgtttacttcatgactaattgcaccttaaagttactactgttgaacacaagcaattgccaatattgattaaaaccaaccagtagcaaaaaaagaacaatgcaatttattaataacaatataggaaccgaatttcctacagaacaccaagcagttcaagccttcacaagatcacgcaaaattcatatccacacaaaagcatgcattgaggattgggtcagtctgaaaaaaaaaacatatatttcatgtgtacaagttgtttactaagtaaaatgatttcagaatataaattatcagtatcacctgctttatggggaatacaacaacaataaagccttatcccactaggtgaggctggctcgtgtgatccatgtagccgctctcacctagtgggataaggctttgttgttgtattccacataaagcaggtgatacagataatctatattctgaaatcattttacatagtatatgacttgtacacatgaaatatactgggtagtgccctgatgctattgaagaatgacagaacttaaataggtaagttcttaaggtttattgtgcgcaactgtcaactgatttggatttttaatttcaactgctaaagtgagtcaagtgacaaattacctcttgttacatgcattagatagacaagagcatgcagaattcagactgtaagttacatccacagacattcccaatctctgcagatgatatcttgtgacctcagctcggatttttctgctatctaccactaatgttctcaatccttggaactctgaaccaaaatgattattctgccgcattgcatccagagacgtgctttctccttttctgaaagttccggtaaaggaaaaagtacttccaattccgggctcacttacaaatccaatttctcctcccatgaggtcaactagacgtttactaatgctcagtcctattccagttccaccatatgttcgggaggtggaactgtcagcctgcataaaaggtgtgaatatgcggctttgtgcatctgtaggaattcctatacctgtgtcctcaactattactagaagttgaataatttcaggcttatttatgccacctaactgcttaaaatttgcccaacttttccatctgttgcatacaggaaacccacttaacgtatcatatgttctgtttgatacgttctggttcaagtttaagccttctctcagcactgcgtccataatatgaagtgggttcttcacttcatttgccagatgaacagagacaaatacatgccctttatcatgagtgaactgaaatgcaccaagtaaactgattaatagagaatataaataaccaataagattccttcttttttattccaaagataagaaaatacactaatttaaaataaaaattcgaaagattattccaaagtctaaatagaagggaggtaaacatataaatccttcaaattgtttatgtagtattacaatgtctgcccattgcattgcatgagtcacttactagtgagtatatatataaggtgatattgtaaagaaataatgaataaaaaacaatatcaccaggattatcaatgaatttacttattaacaccatttcaatatcaatcagtaaagggacacactttcaaaaggacaaaatgatgcattgtttaaaattatgagatgtttccagcatcatgatatatgcaaagaataaaatgggttaaacccacccaaaaaataacaatacagcatgaaataatgcaaaccttaagtgaattgccaacaagattagtaattatttgccggaaccgtttaggatcgccaatgacaactttgggtacttgattggatgtataaacagccagctggactcaccaaaaaagtatagagaacacaagttcatgtaagacttaatgtacaaattataggaggtacaaaactaaggtagcggaaagatacgatctcacctctattactttttcattagatttttcagagaaaagtgataaaatttcatccagaatagctcgtggatcaaaggctacagcttcaagctcaagctttcctgcctcaatcttagcttgatcaagaacctcgcttatgactgagataagatctttaccactcttgtgggcggtttgggcacagtccatctggttttcatcaagctcagtatccattaacatttgcagcatacctggaaaattatttgaaacagctgataattattactgagtattgacaggttgggtttatctatgaaaacaacaaatactttcaattacctaaaacaccattcattggagtcctgatctcatgtgaaactgtcgcaagaaactgcaaaaaagggaaagcaatccttggaggtcaaggtggaaatattaattttaattaagtaaaagaaattataaaccatcagaactcagaaataactttgatgttgaaagatgatcatcatgtgatgcaatatacatatgaaatgtgacaagaattacaatattcttgacatcactctaacaattgtgcggcataacagaaagcctaaaaaaactacgtaccccattgcccagagactcctcgctaagcgaaggtaagggggagggatattgtacgcagccttacccttgcatatgcaaagaggctgtttccgaattcgaacccatgatcaacaagtcaccaaggcacaactttactgttgtgccaaggcataacagaaagcctaaatcccataaatatatcacacctgagattttgccacatctgcagcttcagcacgaactttcagctctctcatttgacgatagtcatcctcaacttttgctattctatttattgctgcataaaaaatatgacccagaagcaaagtaataacaaacacccccactgatgcattgattgctgtccaaggtaatggaggcctctgcttgaacctgcaaaagaaaaggaaaagaaggaattgtgctggtatgagatttcaattctttggacacaacacaatttttttaaagtgtgaaagcaaacctgcagtgcatctcatgtttgcgtagcggatccccaaaatctaggctgcttatgtatagtaggccagtgtcagcaacatcagtaccatacattgtgattggtgcagatgcattagttgtgtcataaacatttacaacaatggtttgtttactggcaagttggtgtagaagcttgtccaccagtgatggaacatcataagacgcacccagatacctgccaataaataggtaacaatactcacataacactgtaattgttttccttttaggggtggtggatcagagcacaaatgaaatgcatattttaaccagtagacaattagatgtaggattaccccacagtagctttgatacgctgctccagtgtagcatctaaaggaagattagtgttatagacagcaaatgtaagtacaacacccagatgattggactttagtagtttaaaaggggatgtcagaaccccctttccagacgcccttgctctcaaaatattctcacggtcctcctgtgtaacaatgcaacaaaatattttctgttaaccagacagataatgaggaatctaataaataattcaatagacaatagtaactcctagtcttatttcttcttaatctgtcactgagatgaatgtaaatcaactgattaggcatgaaaagcatgtgataccagtgctcagagtcattttattgatgttgataagtaaaactcttgtatgtagttgattctgtttaccccacatttgactttcactgttcaaagtaaattatataagatactgtttagtgatctccagttctaatattccacttcatgtatacaaaagctccaagcatctaatgcttcgacctaaaccttgcataaagaaaatacagacaaaaaagtctttctaactgatgacttcacactctagttttctcatacatacttgtgcagaataaatatggtacgaacattaacaggaatgtaaaatttgcagtttaagccattgccccacaatttgcttagaaaaagtaaatcatgttagggtgacagcaagctaagcaagacacaccttccctgacatcatgtcaatagatacaatatgggaaactgtttcttgagcaaatatcactggtgcatattcatcttgaataggtgctggatccaaattttctggaatacaatcttgtactaatgcctcattctcagtttccattttcttaattgtccacccatgctgcttctcaaaatgcatcctatcagagtggagaactttcaaagcataagcaacaccactagtaagtggtctttcaaatgctgtactctctgtatattctccaaaaattttctgcagtgaaacagaagcttcaatgttatttatccttaaattttcttttgtttttaattgttttccctcaagatggataatattacaacaagaacaacatataaatagcagagagttgaagaggactcataaatttaatgtggtttcaacatggagacttatactatgcaatcttcacacatatccaaaccttactggtctaatacaatcaaattcagtgttaaccatatcagaattacaagtgaaaagaggaacccagttcaaaccttgtacacttttttgtaagattagcatatacttaaagcaggtataaagttgttaagacgttccgcattagctagaaatatggccaaatactccttgaaaggcttgagccttgagtaattcccccctcccctttgagctaacttttagagttaagttagatcccacccatttcaaatatgataccaaagtctattcaatcttgatgttaggtacctgtaaatgtctagtcttacaagcttcacactccgatatgtagtcctgggcatgaggggatgcatgttacgatgctccacaatggcttaaaacatggccaaattattccttataacacttgggcaattctctccccctctgttgatctagcttttggggttgaattaggtctagttcatttttctaataaaatttataacaatgacaattagaaatgtggtcaaacatgcttttcttattatagctagtaaaagtgccaaaagatattcatttgataccctcattcacactctcctttcagatttagtttttgcaacaacattaccataacacaatgaaaaaaacagagagaagctagaaattttatctaggctagttgtggagaaaaaataaatcatatagcaagagctttacttcattatctatacttttcaatagctcaaacttttgacacattacggatcaatggcacaacctgaattcctccattttttttgtcaatattatcatatttttcagcatccccacctttttccattacttttgttcattttattttattttatatgtatgcagtttttgctacatgaaagtgagcaacagtgccttttccctagtttttacagatcatttggatcagattttgctttccttagaatagaaaaaacttacatttccttttttactatgcagccactcaaatatgttagttagattcacataagatatactaagcaaaagtgtctaggagacatgcaaaatatctggagtcactggccatgaataagtctgcataagatgggagtgggagaataccaataagagaagagaaggacattgagtacattacctggtcaattgcagaaggatgtttaccatggtgaaaggtagatacaaggatagccagagcatgaacatggttcatgctcacattaaactgatcttgcagcatacgggctctctcatcacacatatttgctagcgtttcttctcttctccgcataattcccatattcaggtgccaaaataaccaaaaggacccgattattccaagtgacacaaatataactagtaactttttcctccacctcccagcaccccttgaaggacctcttggaaaatgtttcaaccacttttgttgtgcagctggatgcccctgaactagcttctgcttttgattcctccatagtaaacagaagtaggacattataattccaatgaggacccaccagcatcctttaattaaattagatgaactcacatgataccgaattgcagataccctcagttcccatgattgcacaatgttctgcaaagccaaaatgaattagcaaattaattatatagtggaagtatttgtttcaaataagcatgcaaggagtgcatgccttcatagttattggacaagcttacaatcagaatctatggtataaatcacattcacaagtaacatgggaaagacaatatttggagcaaataaaccaaaatccactacttttccttgatatgactattattattaggctgtaggttgaatgatttgaaagctagactatgatcggtgatgccctgtcttttacacatcaatacaaaaatttattatagcactagccaagctatagaaagaatgctatgatgccagataggcaattcaagggaatcttttgattacattcaagtgcatacaaaatggtaccactgtagatccagatgatgcattattaatagttacatttctcacccagcttccacaaactgagcactcttacagaaaatgatatttaggaatcctaaagttcatcactatgcttctttttttatctccattcaatcaacaaccatattatgccccccagtataggttgagcagtgagaaaagagaattgtaagctaggctataattcttgggtactccctaatttttaggagaattaacaatttatattatggaacttttgggcataacaaatatatgccttagctttagtaaagattctacctttccgtggtgcaaataactaaccaaatcagttgaaagtgcagagtgcgaggccaatgatacacaacttttcaatgggaatgataattcaagccttgtctggacataatcattgagaattggacattgttctgtaggttctacagtgtctgcaacacatgtatgctcattttgtaactcttgattctctggacatattaactgtggagtactgaccatgccgctgcttaacagcatttgaagtcttctttcatcaatacagttggataaaatctgcatcataaacttagtaagacataggacaaagagcaccactttgttactattcatattcatctctgcaacaaccactgttttctattaaatatctagcaagagagtatccatcacttttagaacttaaccggttgtacaacataaagcgatcctagagaaaccttgcggaaaaagcatcagaatagcatagtttataccctttcatttaagacaatctattggttctcaatattttacatctttcacttcatctcaaatataaaatccaacaagaagttgtttatttagtgacaataacgcccaatagaaagaacagttaatacatagaagaagccaaatagttaaagtttctaagcaaaagtaaataattatgaattatcctcagcgaccacgatatggcgccataaaattgaaagagtggaggggaaagtgtagctcacctgatctgatccagagaacaaggaagccaaagcatgaatctgtttcctactaacattgtaacgttgtagcaaggttctctctctctcttcacaaattgcttcattctccttgctgaccaaatacttactattgaaactcaagatgaaccaaacactccctatggcaacaaagccaaaaaaccaaggaagcaagggcttcctcctacatgtcctgggagaattagacccatgcagaggctcattcagcttccaagacttcatatttgatagcaatctaccatttgaagcaggaagccttcgattcacagacatccttgccaaattcaccaacgtaacagtcctggagattcaaggcaagccccagcagcttgagcagaacattcaaaaagctgaaccaccaagcaccccaccatgaatcttcaactgcaaaagcaaaattgaagcaaacccaaatgttttctcagcaatccacccctcagggcataaagtttggtgctttatgatacttccacaaggcaaaagagaaaagttgcacaaaacccagttgatatatatcaaggaaggagctccactatgcttggactggagtggcccaaccaaaaagtttgtttttttgtgggtatccgtgaaggttgaagttgaagagataacataacaagaagaggaggaagaggagcatggggtaataatcacaccaaatcaaacccactgagaggagctgtgaatgagataggaaaatttgttctttttctataacaggttgtttctgcctcactgacctctgaacacccaacagaagcatcaaagagtggaacaatatcacacagtgaccatcatcttcttgcaaatttgctgatataacccattttgtttttcagaaagaaaatgttaaatgtccccccctctctctctctctctccccccagtttggtgtgcagcattagctaattgaggatggatcatgattatctcatcatctggtggggaaggtttaaccaaaagcaaacaaaaatccatgattaaaaataaattttaaaaggaaaataaaacatcagttttttttaatatcaattattactgtttagttttttcagcaatatatagcataattgaatttttggttaattttaattctttttttttaacttcgatttggtgttttgcttttgcaagagttgacaaagaccgcacccttcagtgtttaaagagggagtactccaactgtgcactgcagaatacggatttaagtgccagaaaagataaaagagagtcagaaaaaaaatatgtgagaagaaatggtccggtgaaacggtgagagaatatagagagagggaataagattttgaaagatagggagagagaaattaaaaaaagggtaaaaatggtaatgcacgtagcacattgtccagttcccagttccatcataagtggaaagtaacactgtaattttatgttcaaaacgtactggaagaagaatgggcaattattcagaggggtaaaggctaatgtgcgcatggtgccaaaatattctggaatcaatggttttgagaaaattatataggtttgataaggggtatataggtgtaatgggggcatcaaataaaatgaatgtcggctatataccttacccaccaatatataataatgaacgaaagtgagaatcaacccagaaatagtactaaacaaagtgccaatttgattaaaaactactatcaaaagcataattggtttgaccatcattgcatggatattattatattaacttaattttttttatcattttaaacatttaataaggtaatcttaattaggtggtgatcaacggcacaaaaaccctcatatacagttttagagtttagatctgtgaatttcttgccttgagagttaatcatcattgtgggatatggaagtagggttatgcctattaattaatgatgatatatgattagtgagaaatacttttttcggaaataggttaagttttaaagtggagtcccacttttatgatttttgctatggcggtgagatttgtcatttctagcaaaaatagtaactaccaacactgttttacatacagccaaattattgctgtttattgtcatgccactttttcttgcgatccagaacatttccagtgcttaaacaatattacaatctttacattaatcaatgatgctaaggagaacctgttatacggtactgttatgttggaaagttaagaatgtataagtttcactcagagagaagaagttttcatagagttcaataaaagaggaggaaatagtatatatacctacctacataagtaaaacctagctaagagtggtagacagacacagcacagattattgtctaatgagattacatgagcttgaatatttccttgacgagttggtttcatatgctaatcacatatgtaagttcaactggatagccttgttattgtttatgtaagtcaatttatttctgtaaaagaaaagtcaattgattgaatggtcttttttgctgtgaaaatatattgtgtacaacatactttgtgcatatccacacaatttggattgagttaataaaataaagcgtttccatttcttatattatagtcagatctataaacaaatttaatctgtattcatactttcttgttaagctaaatataataataaactctttcataaaaaaaaaaaaacaaaaaaaaaaactcatctatttctcattatgtggaagggagggggtgtcctactttctaatgtagaattgaaaaattaggaattgtttgatttgaaaaatatgtttttaattttaatgataaaaatgccatattattttcctatatttcttatttacaaaagttataaaaagaaaaaagtaaaatattttttgttattttttactatttcattatttcttaaagaaactaaaaatagaaaatgaaaacagaagcatttcctcaaaatcaaacaggtctttaagtattaatttttttcacaaatataaattttcttgtaatttttagcatttaacttattcatactaaaaaaagttataaatcaccattttttaaattctgtgataaagggtaaaaaacaaaattccgtattatgaatgcaggtcagttcgattcgggtgatataacaacatattggaatatgatgatgcaagctgaactagctgtgcttcctattggcaccgttactttgttttttttaaggggagtgttcgatcatcattgccaatttggcttggcaccattacttttttttgggctgttcatagttggcaatttggcaccattaccatgaagtacgtttatcaagtaaaatcataaaatatttattcacaataatataatatttttcaacgttattatataaacaatatcttccgccgaaaataagttgacatatagccagaggtaagtagtggctgtatattttacgagaaagaaagtaaaacctacggttttaggagccgtttagtttataaattgatataattaattttaaattgtcaatagtgattaagatgtattttaaaatgaatttgaattataatttttacatcttttactataattataatttttacattgatatacgtgttgtagaaaagaaaatatttttataagattggcaaacagaacacttgagggtcaaaaagaaagtgaccagccagaaaagaattaatccaatcatcaaagcaactcttagatggttaaaacttgtagggccatgcttcattgtaatccacttcggcataatggcattggaagctttgttactttccctttccaacttttcttttcacttcttgccatggaaactaccacgctatattaatttattcatcttttgaagctaagtactatgttcatgtgggaagtgcattactgtatggggcacatcgagtaactatgtgtaggttcaataattacaaaatccagttgggcatagacccaccacaatgcctattattctccctaggaagatttctcttcaagaatatgcattctattcctaattattccagctacaggatttctcaccttttatttgtaacttattgatttaacccattaaagacatggaatttataatctttcgatctattttttttaatttctttttcttgctagaatattactttttcttcagtcaatggttttaaattaatgaatagtaacaagaagaaactattttcaaatgccttaaatttaatacaatttccttgcatggttgtacaataattattttctttatgtgatattattttaaacagaaaccatcttattgagggagggggggagtatttaagacacagcttaatttaggtttggtcgccattttcgtggttttcaagaactaccaaacaaagccgtttaccttcaaatctttctacaatatgtccgcatgtttgtattgattaagaggattttataatgtgaaatttagtattgtacggctgttacataataatccaacgattcaatcaatgttccctcttcgatgtaattcagtgatggttaagaattaagaaatatataggtcaatgaaattatttaaggacacatgttttatagtctactcaccaaagcaaaataattaaagaaacttgtggacaaaggtagggatatatatatatatatatatatatatatatatatatatatatatatatataaccatttaatcataggttaagagagtaagtttcaaggttaatttaatgactgcggtctctagctttcagggggagggaagggaggcaaatatatatttttctttagtgagcgtctaattttcatgttggaaataattgtaagtagagatttcatttgtctggctgaatgaaaaatttgctatccacgtggatatctgaaacaaatattcacaaattttataaatattaacttatttattgatatttgtttttctatgaatggaaactaatatacaaacagaagaatagaaactaaagagtaaatagtaaaagagacattagagacatcagccaataacagatgttgaagaagaaccttgtcgagccaaccagtcgggcatattgattgtcctccctataattatgatcatgcttgaaggacagatcccaatgcaaatgcttgaagttagttatcttttggataagtgctgcatatggatgcatacgaatatcatcctaatccaataactgaagagcaactgtagatttgttgatattttttttggtctaaacagtattgatatttataagcatctatgaatatttatttaaatataaaactttataaaaaaaagtaaaaaaaaaaagagataaatacacattaaaaaaaattagtacaatttatcttatacataaataaaatagtttaatgattatacagtattatcaactacataattttaaaataatcataataaaaattaataaatttatcatacatgaaaatttataattgaatgataatattttacattgtcaatgtatatgtatgttcttcaagtaagaaaatttaagtagtttttaattatttgtactcaagaaaatagataccttattaaaaatgttcaaaatccaaccaaaatgtttaaatcatcaaattgatcccaaaaagattaaaataactaaataatcaattttttcatggtcaattcgttgactgttatacacaatcaatgaaagacttttacaatgtaaatcaattaaaaagtactattgatatgacttttagttgtgaaggtcaataaatttttcatacataatagttaaatacatgttttgaaagattaaatatgtttttattctcaaatttagatcattttttttttggttctttaaatttaaatttattatttttagttcctcaattacaaaaaatgcccccctgaagtaaaaaagtcacaatgcatctgaatagtcaaaaatcaattaagaatgattaaaaagaatattttttaagagactaaaatataaatttaaatttaggaaaccagaaataacaataacttaaatttttgggacaaaaatatatttaattttgctttgaatgaaagacttagtttgatccaaagtcaggttatattttaaagaataaaatgtaattataattattaattatagtttaactattttaaattaataatcataattatacttaactttttaaaacgcaggtccttcattctataggaggcaaatttaagattgttagatgcatatttgtattaatttacttaaaaaatataattacttattttatacttataaaataaatattaaaagaaaaagcaaatcactaacatgatatagtattcgtaagataattatattttttaagtacgtgattaagagcttaattcttatatatatatatatatatatatatatatatataatatagtataatataatatatcagaatatattagttctttaattagatttcgataactgaaaattgcaaccaataataaccctaattaacataaaaatgtaaaaatggcccaaaagaaattgcttattcttttgttttgtatagagaaataaaataagagtaaaaatatgtaagtgaaaaaaagataaaaaattattgttggtttgatttaagaaaaattaagataaattaagtaaaagagaaaagagaaaaataaaataaaatatcataatcgattatgtaaaataaacatatgtaagtgtttggacatgtgtttatgatacacctaactgactcatatcgatccatgttcaaggttgaaactattatttgtataaaaaaaaaaaaatcacgataaagacacgatgcctcaatgtcaatccaaacatgttgattatcaattatatatgttttttaaggcattattttgtcattttcatataaaatgtaatataatttattataatacaaaaatgatccattattattttatcatacacccttcagtcaagtgaacaacgcttctgagactagattctcatcaattctttgctatttcaactttcttttgcaccaaaatatttttatgtaagattcacaaattttaaaaaaaatttcaatacttcttcatatgtcaaactatgaatttcttataattagtacttgtttgaatacttgttcattggagaaaacacatgcacgttcttgagcacaaagaagtatttccttaattacttttgagaaaacagtcattacattcaacgaaatgattttgtaaacataatcttaatcactttttcgtccttttcaactcatttctgatgtgtttctcttcaatcaaatacaacataaataaatttcagtaacttgagaaattggtctctaactttcaatttgggatactgcacattcaaaaaaagtgaatcacaaacatgcagtagagaatagagagagaaaattgaagaataaaactacgtaaggtaacatcagacgtttgatacaaggcgggtaccaaacattaacaagaaatctgaatacagtggtagatggcagccaacagcatgtgtagtctgcctcggatgcacaataactgctcctttcaatttcagcgtaataagctatgccctatgctttagtatgcagctacctagctagtctattcccagttagctagagagacacaattatgacaataatcaaataagatgatcatttttatttgaataaataattaaattcatcttaaaacatgtgattccatgataaattaatttatgaaaaataaaaataaattcaatttttaatatgtaaaatatatgataaattaattttattattaaattttaaaattattttattattaaattataatgtttaagaactaatttcacaaaaatatatatttttaaaaatcaatttgatattaatttacaagtttaagaattaatttatcattaaattatttatgatactaatttattgtattttttacatattaaaaatataaatttaactatttattaagtaaaagttgaatgattatatactttggatttaaaaatgtattatatcaatatgatcatgtctttgttcaatttttcataaatgaataacgacatattattctctcgctactattaatcttcttaagattttatgaaagaaacactgaataaaaaataaatatttaatatttcaaaatatttaatatttttatttaataaataaaagggttatatagtaaaaaaaatgtcgctataaaatgatttattagaatgattctttataaatattactaaatgtcatatttttcataattcttcctaaataaaatcgacaactgtaacatgtacaagtctgaagttgacaacttaatcaaaatagagacaaaactgataaaagacaaaagacattataaattagctcacctatctattttcctgacacacaaccttgtcttgaccaagcttggtagcaacctttgctctgctgatttttatctttgcaaacgtctgtaaccctcaatattagctagctagtgaacattaattatttctgtaaggttgatatattcatcaaaatttgaacttatataatatagtgtcagttagctgtttatattttataataatgggtgtgaagaggacatgctgatgcaaatggctttataaattgagcatgaaagattataatctccaagcttgtcttgaaatgatttaccatattgactcttggtcaaattgaagatttcaaatttatttttgttttactcatataggagctagcgtttggagaccatttgggtaagaaggtgtcccccacctatggtggagacacgactaccacttaaaacaagtggcagttgaagttttcaacagctgaatcaatttagagcatgctcgtgtttcaaagaattaaaatatgttggcgaaaaagttttaagagataagtatgtaattaaaatacagaatgaatattgaagatgaaatttatatgattcgtttttataagagtgttctaactttaaggtacagattaacaaaataaaaatagtattatacaaaacatttaaaaataatttaatatttgatttaaaagaatttaaaatgtttaaccataattaatactcttggatttttcattaatgaaatcattcttttttttagatattaataagaaaatcattcttgaacatacaaaaattaatttttacattaatcaacattaacttatttattttcttaaagttaagttatttatttatgattctaattgtatatgttaatgcgaacttgctaatttaaagcaatgctaattgatgatttaaattaaataattaagaaagtaaaaaaattattattacaatatattgtgagatgaaaacgtttaaaaaaaataaagttaagatgcaaacttttaaagatcattgataaatctacaatatatccaaatttatagattttttttaacatgtttcaaagcattaacttggtggaatattgtgagaaaaaaattcatattatatattttttgtgattcatgatttcaatggtttaaatgaaagaaaaaagcgtgaatagacttctcttttcttggatttttaatgtagggaagatgaacaatagtgagaagcttcaaattttatatctcctctttgtcaaactctagaaatgtgattgaagtcatcttggtccccgtgaaaagcttaaatatagatctatatttttcatgaagattgtttgattagattcaaggtggaacaacaaaaagttattggtataagtggtttgtcacttaggtttcttaatcaatatttgagatttaattttgacttgacttgaatatgaagtgattatcactttatctaaaaatagaataacgatggaaagaaattatacctcttgattatatataaaaaaaaatatatagaaaaaatatacctcttgattcaacgcggaacatagacaaaattggacttaaagttgaagatgacgcgttgtcctaccaacatcaacgcaagtgcaatgtttaaagaaaaaatatagatctatatttttcatgaagagagtttgattatgattcctctacaacatcgtcaaaaacaaatcgacacaagtgcaatgttttgagcatatttagagatgcagatgttgaattgtacagtgtttgacaggtgcaaaacacgggcctagcgtgaacggagtccctgcatatcgctactggacgggcattgttcattgtcgagtgcgtaatgttcactgcttaacgttgaggcgaactagatttgtggaaaatttcatgtctggcgcgattcgtctaagaaattatatcattggggacaatttgtttgatcttcctaggactagaagcgagaaagacttcgacgttcgaagaaccattactagtggtagagaaaaaatgagaagagaaaaaactaaaaaattatagacaaacacaatttgtatatctcaataatttttttccttttaattttttaaccaatactcttgggacatgggttagtatttttcaaaaaattattactcatttttttttcatacaaagttttgataaacctatgtttgccctgcagacacctgtacaatctcctgatctcctctaatatgacattgacatgttgtttaactcaacaaactgcttctgtctgaagttaaaagttaccaacgaagagttctgtgcctaggactagctgttttcgtagctaaaatctgaaaaggatttcctatctttgtctcttaaaacacatctgtcatcgctttatgattcctctcctaaaataatttttattcctatttccttacatactgtgttcatagtagaataagaaaatgggtcaaactcagatatagctcgttgattttcgaggcttgagtcacaataatcactccttgatgggtatgtaattcatgtaaaacagaaaaatgtgaagtggagattcaccttcctctaaaaagggtttaatactgaatattgataaataaaaaaaatcaccttcctctaaactccaaaacaatctcagcttccttggctaacaactacattctccgtacctcatcatgcacaaccggcctcccgcctacattcctagaaaggggaagaaagtgtggcaacataagcgtgaaacaataacgtggctataaaaaccaagcaaacggagatgtcattgcattcatcacacacaatcacaaacagtaaacattcaagcaaaatctcatcctttctctaatggctatctggtttgtgatccttcttacattctttgccattggtgaatctcagtccacaatgtcattcaaccaaaccgacctgcaggtagccatgactgacatgagaagtcggtcctactatggatttgtcatcctcctcaaaatactcaacagccagcccaactcactgcaaaacaatgatttgacattcctaatgccaaatgatgatgaactatctcaattctcaatagctctagaccagcttcatgatttcatactcagccattctattccaacaccattagtgctcagccatctattacattttccaaatggctctgtggttccctctagcgttccaagcagggtgatcagcatcaccaacggtgggagaacaggtttgtttgtcaacaatgcaaggattgtcacaccaaatgtgtgccaaagctcttccataagatgccacggaatcagtgctgctttgacatttgacaacatggtgccttcccaccgagctccaaaacccaaggagtctccaaagaacagcagtgtgacaaacccatccttatctgtcaaaaagatgaatatcccacctttccagtaaggcgagaaaaatactttgcccttcagctgtaatgtcgtttcgttttatcaataacataatattacttttactttgtctccacaatgagctatttggcctgtagtcctgatccaactcactcaccacaatgttaaacatattgactaactaattagattccacaaatcaagaaacaatcaataatttgtcacaaatgcgtattcatacatacaccgcatagaacaaaccgaatttcaatctgagttaagcctttagttactagtacctcttcgatctacaaaaggcttacaatgcttgaaactaatggaattagactaactcttcatcaattgtgcaacagaataacattgctataatatgtaaaagattataacatacactgaacccgtactcatgggtttgttctgaaagggtgggactcattagattgaccgtctgccttcggaggaacactgtagagaagatcatggattttggaatacatcagcattgaagatgggtcacccccactactgctctgtgatacacgagaagtctcctgcaatttgatcttctcatacagatattgcttctcagcctcagcctcacttaatttttgcttcaaatagttgctagtatattcttcctctgatttatctgacttggcaagagcaatcctctggagccgctctgcctctcttttagcctcgttagcctttaactggaacatatcagcctctgcatttttaagcctcacaattctctccagttcttcaatctgtaacttctttttttgcgtgtccattttcagttctcctgcttctctggccttgtctgctaattcacgttcacaagcatcaaaagccaagcgagctttcttgaacattctcatcttctcatcagctactatttccatctttcttatagcctcatgcaccacttcagcaattctattgcatgcctcctggggagcaatcagccttccactttctgcattttccaggctttttggagagtccagatcaagctcttcatatatgaaaagcattggttaaaacaagaagaaaggataattaataaagtaatagaattaattttattgattatacatgtttttaactatgcaaatcacaatttcattcctagatatcttcaaattcaggttttaatgaagagaaagcaggaagtttggagataacctcaaagtatagtctaaaagcttctttttttaatcattcctaacacagttttaatgaaatttcaacttttcagtacaaacaaatactactatgatatgaacatagtaaatgggcccaaaaaaaaaatgccaaaaacaataatgttgtattcacactaggtgcatgtgcatccatgtgcgtgtagcctatgtcaaggcagaaactttaaaactacaatttgcaggtaaactagaaaacttgtaccttggaaaaccatcaatattgccctgcatgctgccttagattccactttcccacttttcaatttttccttgagatcatcacacttccaataaagtttcctccctcgtgggtctttactaccatgaaagatcctactgacaaaatcaagttccctcatcaatgcctctccatcccatgatggtgcacaatgctggaagacatctttaacccaacccagaagttctgaagtcctgttacatgcttgacacctgaaaaccatttcacttggccctgctccattctttgcagaagggcccatacaaataagttgctcacgtatggcacagtctgtgtgagtccaatgagaacacaaatcacatccaatccagcggcatgtatttacttcaaagtcaaacttgctgcagataacacacatgcaaagattgcagaaaccattgccattagtgcacgtctcacaggtacaatcttcagcaggaagttggttttggcaagcaatgtttctgcatctcttgtacacaaatatttcaatcagtgatgtttgtgatagactgatgctaggatgtaaatatccctgaattccagtatttattgcaacaaggatttcaagctgtacacgatgtgctcttatcaatgtcttggctgttaaatcagatctactctgaacaagcttttgcaaaatgaaaaattcttctctatgctgtgagccattccctccctcaaggataactcgaagtccatttttcagttcctcaagaaattcgtcaggtaaaagatgcattttctcacatattatatcaactcgttctcttgcaatgtcctgaagactaattttgtctgcactagaaacacggcgaataactaactgctcaggacaatccatctctgcttttccattctccatcttctttgcagcaattgcatcagcagtaggccaagtttctcgagaactggcactttcagtaggagattcacggagattgtcagagtttgatctaggctcctcgggagaaaggcggggatccgaagaaactagagatagagaggtttgtagtcctccaacccgtgactgctgtggtggagggagcattttctttttctttttcacaaaggcttctgttttatgttagagcctggtgacctacccaaaaaatatttacttagtcagtaactagctaaggggattatataccactgcacatgattatcacatattctttgttatgctacaaatagttaaatactaaaatgttacaaatgagcgaggaacttgagaaaattcaaaatctgctaaaagttgcaggcttacagcctttcatcctctgcccccactccacataaacctccaaaacacagaaacattacaaaagacaaagcaagtactagagactagagactagagactagagagtagagagaataattatcaaactatttagtaagcagtcaggccctaatttttccacaaactgatgccaaaaaacaaaatacattcgaaaaaacatattatcataatctacacaataatcacaggaaaatccatcagtgataacggaaaagaagaaaaattagaaagtttaataccagtgatttcactcttgattctattgtgcaacgagcttcttatcaaatgaagaagctcgagagatatgcaatctctcacagaaactatgatgtcacacaagtccactcatcaactcaaacaatagatcaaatgataaagatgcaagttgaacgacccagcacagaaagttgacattaaaattgagacataaaagtcgctgcaaaggatgtttcaaaggttgatcgaaattcacgcaatcacagcaaaaatatccttgaaaaaataagaatgataatttggattaaaaaggagaggaaggttaccagagagaggagaagaaaaatggaaagaaggctaatcgattggagtatgtatcttccttgttcacaacttaataaaagaagaaatgggggatcaaagaagagaaatgggttggttaggtcaaaataggaatggtgtgtttgcccattttaccctgaccggttcagaccgggaaaaggacggaaccggcgaattaagaagaacacgacaaaatagaataatcaaattgattttatttttgtttgaactgtggaagtgggaaggaaggtggtctggtcgtgttttccaacgatgacttgttcacacggttgactagcgttacatgtttactcattcataattgtgccatctttttcttgttgggcggaagcgttaattaactctgtcaagtaccgttaattttccaccaaattatgccaagtcattacaacgctcctaatcgaaaccattactcttcagtttcattatgatgggtaagtatgattgaaacaatttcaatttcattatactattactgttcagtgcttctttccttggtttctgaattatcatgaattgtgaatggtttgcttttataaattgtttactttcgtttattttttttttattttttttcatcttttgtcacgaattccctttaccttccattatgattacataacataataattgggacccggaccaagtttttcttcttctaatttttatatacattaattgtagctaacagtctatttttacttatgacatcacattataaattacaaagtgaaacaaaactctatattttttatacatctcatctcatttaatataaaaaacatcctcttgaatatctttattgatagattttaaattgagattttagattattttttagtaaatcttaatgtcacataaaattaaagatctcttaagatattttttttaatagtaaatctcattttaaaatcttagaaaaaaaataaaaaaaatttattttttttaaataatatttagatcttaataaatcttcttcaactcacatatatgcaaattctccgctcaggaataccaaagtcactgcaatgacatcaaattttttttcgcttttacctgctgcaaaattagctaagttgcagttatatttgtttattgaatgggtttcctcaaactttcccttgaacaggcctgcgacatttggagaaccttcagctttaacgttgatgcaatcatcattgaccaccacctcagtccaaaactgacgcttgccatcatttttctcataataatctgatgttttggcttggctaccacgaagaatagattgaggaacctccttgtagagtgtccatgacgaagcccgagaatgccatgtgggattagaaattagctgtagatatgggaccttgcatacctgcatgtatgacggatttaggatcctgggttagtaggttaatttattttaaaaaataaaaattgataattatcattatcatataggataattgggtttaaacacgaaaataagatatataaaatataaatttttaagatcaatatttacattttattaaaataagagggtacattaatttactcacatgtgaattggtaaggaggttcaaatacataaaattagaaaatgcaaaatataaaattaaaaagtataaaatataatattttaggacctatgttagtgattttattaaaataaggggtacatttgcccaccctgccaatgtagctccaccggtgcctgcaggtatcaaaaacttaaataaatgtccattttacaaccaactaaagtcaaattcggaaagagtcataccacgttttccagctctgcaagaactttggttggaaatatcctgtgagccaaagatttaaaaaaaatgaccaagaagactggatccatccttttccagtaaaccacaagatgatcataatagtgtgtgcatgtcttatgtctaagcatttaaattccaacacaactatcatgtaacaaagacccattcctctctcctttggcattatgaattttcaatattagttagctaaagcctcaaccacctaggagaaaattgaaggagctaaaggctacatgcagatagcatcaacatgagaaattaagcaaaactgacttgggcatcaatagaaattttggtaaaactgatgtcaagcacatcacacatcaatgcaaaaaatagatcagacaatcgtaaaacaatggagcctaaaatacatttatcatgccatgcataatcattcatcaaaaacaaatttcatttccaaaacgtgatgtaaatcttataagtaagcatagttattgttaagataactccatgagagggcttaatttatgaaaaatatatttaagttcagcacacaagattcaaaatatatgcactaaattttagcatcgatgaacgctattgattgaaaactaatgaatgatttcatatctaacaatacccttccaattattctaatattttatgttataagtactatagaacatatcatttgccaaaaaggttaattacaggagtaattattaaaatttaacttattcaattgagacaagaaaatataatcaaccttaaaatactaaagaaaacctcttcaatatagtcacatcacatataatagtttttgccttcctccattatatttctcctttatccatacacaatctgtaaaataggcaatttggcatgttgctggaatcttgtaatacatcagcaccacaatttagattattccaaatttccattgaccatatactgaacaacctttcagggaaaaaagtaaccgaattcaatgcatttacccagttgttattttatatcattgcctgataaatgaatatattgggggaaatatatcaaaatgtgttataatcagcatagaacttaccatcaagccattgttggctggctactttttcagttagggatgtggatggatatatttgtggataaaatttgtaatatatataaacagataaaagatagacattttcttttactggatcaaagatcacggatttttttcaatccacttgataaacacaatgataaatatctaaataagtatggatgaataatttaagcaatttttatttttgttaataaaatggtagagacagatattaaagtatatcagttgttttttattattatttgtaagaatcaaacacaatcttaagaaatttataacaactttcacattttgctcgatcacttgagttaaactcgttgatacattaaagtatttgttttactatactcgttaaatacttgttgtaataaaattatttaagtatttttgttaaaaattattttggatttgtgaaatttaaatattatattttattagcttttatttgaacttatagaattgaattatcttcgaggacggttcctggaatcttttttcattcttgggaatgttatttccaagaatattagattagaatgatatttttggatatttcaagaaaaatacatttgtttaattattaaaatttgattgagaatcttttttatatttccataaatatttttaaaatgtgtttggttcacattatttttttctaaaaatgtatgttatattactaaaatattttttaatatataaaataactcattatatacacctacacaataatacaggagatcaaatactgcagtttacaaataacattgaagaatcttataaatttttctaataaatttcttaaccacattttactattaaagaaacgaatacccttgtaaaagacaaacaacataaaaagacacatacaacataactttaaccaaactccaagtaaaccaaaaacacaatcgataaactgtcttcatatcaaaaaataaatttaaaaaacaactgcaacatacttgtcttctgtctttaaattcacaccctttgttatcaaagttgaacagtaaaatctgaaatactaacttatatatttagatattatattgagggtataatagaatttttacataattaatatgattctcatttcttaaaaatttatattttcatcctcttttcatgagaatcatctcaatataatattaacattaacatgaatatctcactttcctaaaaataaaagatatgaaagagtatttttcaattacctttaaataaatgtaaaaatatatattttgatctcctcatttctcgaaattcttaaaaaggatttgaatgaacaaacactccctaaagtttattaagttttgttttgaattcatgggactgaagcattttaatatttaaatttattaaaataaagtataataattaatataattgtgttgagtgtttaaataactttagttttgacctttaaattattttttaaagaaatggttaaaataaataaaaattatagttaaagcatctaaatatccacatatatttgcgaatattaaaaaaattgtaagatggtcgtgagtgactcttgttctatctccaatgatgttaagatggtcctcttccatctcctccgccacacccttcacctcttcaaccaaccgtactcctccaaagacacgtcgtcgttttcgggtggagtcgttgaagcggagttcgaaaccagcgtcggtggagttggtgaaggaccccaataaggacttgtgccgcattctccgaaccgaagccgccatcagaggcgttcagaacaaggccaagtcgtcctcccacaaacagctctggcccaaggcccttctcgaagccctcgacgacgccatcaaacgctgtcgttcgcactccgctctcgaggccagtaattaattgattttaggattaacattttctgtgtctgaactctgaaacaagtaattatgactgattattattattattattatcatttgcagatttttgcactccttcgtaagcaatactggtatcaaccacgatgccaaacgtatgcaaagcttttgatgatgcttggcaagtgcaggcagcctgaagaggcttctctgctctttgagatcatgttgtctgaaggccttaaacctactgttgatgtctacactgctcttgcaagtgcttatggtcaaagtggtctccttgatcaggctttttctactgttgaagatatgaaatcagttgttgactgcgaaccggatgtatatacttattctattcttatccgctgttgtgcgaaatttcgtcgttttgatctgattgaacatgttctagcagagatgtcgtatctgggcatcgaatgtaactgtgtgacttataattctatcattgatggatatggtaaggctggcatgtttgaacagatggatgatgcattgaataatatgattgaaaactgcaactcccacccggatgttttcacgctgaattctttcgttggagcatatggaaatgctgggcaacttgataagatggagaagtggtatgatgaatttcagctaatggggataaagccagacataacgacgttcaatacgatgataaagtcctatggaaaagctggcatgtatgagaagatgaagactgttatggatttcatggagaagaggtttttcactccaacgatcgttacatataatactgtcattgaggtgtttggcaaagctggagagattgagaaaatggatcaacactttctgaagatgaagcatctaggagtgaagcctaattctataacttattgctcacttgttagtgcttatagcaaagttgggcgcattgacaaagttgactcaatcatgaggcatgttgaaaattctgatgtagtattggatactcccttctttaattgcataattagtgcctatggtcaggttggcgacttaaaaaagatgggcaagttattcttggctatgagagaaagaaaatgtgaacctgataacatcactttcgcttgcatgatccaggcatacaacacccaaggcatgactgaggctgctcaaaacttggaaaacatgatgatttctgccaaaagtagctttggtatgttgtgctatttgctctttgataccttttctatgttttctatgcttggtctgtcctattgtgcttggtaggaaatgcctaatctaataagccttccttggtattcgagtgcatgcaactattgtgcaggacaatgttagatgcctattagtgttagtctgtaagtgatatagtcagctagttaggttgggctgagactggcaaagaaataaggcataatgtaaaaatcatgcaaagaggctctataaatctatatatgctgttaatttatcaggtgtattcatcttctcaaacttgttatgcgaaagtagcagttatgcataggtctaaagggaggggggtaagtgggttgagttaggcattctgttttgtatcaatgtaaatgaggaattgctgaggcatgtgggtggaatatagttttcttctagtccttggaaggcagaccatttgttctctttgcctttatatattttcttgttttctgcaatagtaatgcctgagttttgcttttcactagttggttcattatcccttgaataatttttatatcatcattcatcaacacaccttacccaatgtttgatcaacaggcactaagttgattggatgctagcatagataattgtgattcaagacttaacaattctactcatggggatcctgacttggaaatctttgagaacttcagcaggtaagcatagattcttcataagtacattattattctgaaggaattttttttacccgtcaatttggaagtcatttactgtattatgttcagaaaaacatagcttcctagttttattcatagttagttggattaaaaaaaaaaaaaaaatccattaaaagcattgttttcactgaattctctttttccttcttatagctccttatattctactatgcctaaaattcacaagatagaagcctgtataaactgaatgtatgcttaagtctgaaatgtaacccagtaccttcaaaacactttcatagtcatcaaaggtacctcaaaatctattgaatactgtatcaagcagccaattgcagaaggtatcctttgatccaaagaggatgcctatcattcaaatagaattccttctcttggggagcaccctgttttgttcttttcaaaggaagttgttctttcttttttgtttcatattgaaatcttatgttttggattttaagatgattcctttactggttttcaatctaatcagtataggtgaatctctcttgagcatggaaattttttagtctgtatgtcacctgattttatcaccagtttcaacttttaattgtactaacatgcctttgtcatgttaagtacacaattgtttgtcattgcctgaaaaatgaatcaggaagaccccaaagtttatttcataactggttggtccaataactttgggttttgtttgagggtaaaaagtgggagaattttttgggtagaatttttaaggaagtgagttttatagaagtaatatttctttaggggggatgattttttttaccctattattagggtgaaacttcacccccaataattattgttctttctaatttctcattctcttgatcgccaattgtttcttcccgtgtatcaaatgcgtctgtgctgccggggtgacttttaccaatacagtcttttgcatcatcacccttaaactttgctgaatttggacatttgtgtttcctgcagggaatctatagatgatatagcattggagtgcacgttgcatgaagatataaaaaatgttgggtttattatcataatctgaagtgtagtttcaatcatcaaatttggcgtcctgcataccatcatgtatgcaactcagtcaaccaattgggttgggtgttcaattttgaaagacagaatacgataccagtgctttgcagtctatacagctcatacccacctcgcttaccgatgttgcaatgtgccgtatgaatgtgttgttgcagcccaaattgccattaataccgtagcgtatcatgaaaaatgctagtaacactaacatttttcttttgacatactctcttctattgggtgaaatttatgttggtcccatcaaatatgcaagtctcttctcatttagtgggtttcgttccaaaactagtaggacctacatgaattttaacaagtagaaaatagtgttacaaaggaagtgttggtgttttatttgcacttttctttataccactaaaagtcctcaaagcaaatgagttgtgcaccaagtaattgcatagtttgtcaataatgtatgaagtataataaagttcaaccattgaattgttaaataaatgtgcttctctgcccatggatttgtcattacttgaatgtattattactatttagtgtaccaaactcttttttaaggtaatttaaaattattttctgttttgagggtaacgtggcataagtcatcactctttgccaagaaaactcattttcattgccatgaatacttgactacaatgtcttacggagggagaggatatcctctgaggaaagattatcaaattattattaaatatgttgttaattttttggattaatattattttgcatgctcacaaggaacacaatacatttcatttttcttcgtttatgcttttttttcttcataaagcagcacaattttttcaacaaaaaagaatgttgttcataacatattcattttgatcattgatttttttttctttatgcactgaatgcctagtttgcaatggtcaaattgagagggtcatgcaagcacaacacctttcctggtttgtgtctatttgtatttataatagggtctatcttgtacaaatttgcacgagtttaaataggatagaaaaatcttatgcacacttgcacaagtttgccctggttaaacatcattaattattcactttccatcatttttaactaaccgattaattataattttttgaaaaacaactatctctcatgtttattattacatatgactctttaaaatttctttctcttctcataaaaaaaatcttaattttttgtaaagctcctgttaagtaagtattgcatcgtagcaagaaataaatgggtaacgtgattcttaaaacaatgttgttctccagggagaagagaaacaagaaaatgactaagagaaaataagatttccaggccatgttagctaaaaggtaaggaagtaaaagtgtatgaaagattgccacaaccatgctctttttatatgcaaggattacttgtataaaccattcttctataggtggatgtgttgtttggtaattggtatataatatatgttttcttttttgagatgggacggtggaaaatttccatacttggatggactttcaattcatcatgtaatactctttgcacttgtgtcttttaatcaatgcatttttaatttgcctaaaaaaattacgtacattgtgtggtttgagttttccatacttttatcgaccttcaattcatcatgtaatactctttttatctgtagagatggaatacttgaatgcactttatgaatgatctcataaatttgaaaattcatttgcctatatctttatcaacttttatcattaaatcaaagttgagatatgtttataatctttgcatcccattctaatttttatttctagtccattttttggtgtggaggggagacagtaagagaaaatattgttgttgtaagttgcagacgtttgtcccacaacagagagggtcattgccgaagcccataatgttggcgtaacaatcatcgaggtcgccaatttggagatagtcgcaaccgaagcagaagtcctcgatgatgtcgatgtcggtcagggtgagccgctcttggctgaagtagttgtgggtctgggaatcgtccagatagtattggttgtactcgcatggatgtgtgagtgatgaacaacgtggctcatttcctataaccgatttcagttgagtgtactgtggagcttgacattcaacttcctaataagatgaggactccactctattatagtttgcatctttctgcgggtaacaatcaatgcagttgagttttcactgagtccaagttatgttactccctgtgtcataggcaagtgtatggtccttctttggtgtccctatatcaaccaccacaacatagttcaaacttcaaagtattaacaattgaaacacgatagaatggtaattcctcccatcctcattgtcacgcctaaacctggactcgatgtaatctactctgcttgtccagattcagcacatcaatggctaactaagctctcagattaagatgggaacatggcccctctttgtggaccaattccattgatccttttcttttcaaacctgaagcaaaaaattacaaacaattgttataaatttgaatttaaggggataagtttgtgtctagtttgtgatggtcaaattgagaggtcatgcaagcaaaacactttcctggtttgtggctattagtattcatataaagatttttctatcttgtgcaaacttacacgagtttgcacaggttcaacataattaattatctactttccatcacttttaactaacctattaattatgattatttgaaaaacaactatctctcctacttattactacatatgaactctttaaaatttctttatcttcctacaaaaaaaaaattaacattttgtaaagttattattaagcaagttttgtatcgtagcaagaaataaataggtaatgtgatttttaaagatttttttgtcatactattatagaaaatcttttgttgtgcaaaattttgccattttgatctgattgaacgatagtgagattgtcaacacaacaagtgttgtaggtgatatcaccaagaacgacgtcactgagaatgatggttttcaaacactaacttctaacttctccattgcaacccatttctttcccttctttgctactacctttctaacgttgtcattgttagtgatggtgctttcattggtgggagtgattgtagccaatttgtgtccgattgcaatggtggtgaaggggtgcctagtgaagggtacttatgtctttacatgtcttttgggaggggcaggaatcaaaagtccagatttgatttaatggattcaccaaaaacagaacagatttattggaccaaagtacaacgcataatcttttttgtggcaactgttccattgaaataattcttatctcatgctgccacagcatatttatccaaaattattatggtatctatttttccccaagcaaaagaaacacttcttggttatgctggatgttttataattacaacggaaaggataactacaaatattactttggtaaaaaaaaactaaatgttactatcaatacccatgttcttcaagaatacaatttcacccgtaagcaatgttaaaagaaagaacagaaagtaacgggaagaaaacaaaaatgtccacatgactgtcctctcacttctgaccaccagcctcagttggttcaaccacctcagcttctacagtttctggggtatggggccggattaccgtggactggaactgaccaggtgtggaccatttaccagtgagagccatacccatcatctcatatatcttccctccaagttgtgctggattatcaggctgcacaccaacaaacaaccaaaagacacaaagtttaggatttcgcaatggaaacttaaataacattcaataatatggagccatgagtttaccgtaaaaccactggaaaccaaagcagcatcatacaaaagatcaatagctctgagggcatcttcatcgtctggatttgttttaaatgcatcctgaaaattatccatcaagattacgacaccataatttcaatttgtaatcattacaaagaaaagtggggattatctatttatcgtacatccaagttcctgataatagaatggtcagggttgatctcaaacacccttctgctcctcatgaattccaaactggatgcatcacccatagattgtgccttcatcagcctgcagtaagtgtgattaatactgaacattgctactcaaactttcaaaatacataatttaatatcaaagaaaaaagatgacaacctttccatgtttgcagaccaaccaaattttccagacgcaaggacacaaggtgaagagctaagccggtttgaaatttgcacacttgcaactttatctcccaatcgtttcttgatccagtcacatgtttggccaaattcctgcttcatttccttttccttttcctcattcttatcacctgcaaaaagaacaaactatcaacatcaacaacatctttaactcaagctaattggggtcggttgtagatgaacccaatgatagatacaaggaggttttaaaaaaaaaagaagtggaaggggaaggggaggggaaaggagaaataagataaaagaaagaacaaactatacgtaacaaatttgaacattaaacaagaaccaagctacgaattcacaccattgtcaacattaaaattagctcaaaagagagactaacaaatatttggttaacaaaatgcgagtttatgttcaatcaaattattgaaagtttaaagaagaaagaagttaacctagatccaaagtttaaagaagaaagaagttaacctagatccaagtcttccttgctaatgtcaacaaaattcttttccttgtatgatttaagattttgaatagcaacttcatctattggatccaccaaaaacagaacctggaaaattacattacaaaaaacaccaatatatgtatattaatcgatagaactaagtactcaaaagttaaaaaactaaaaaaaaaaagcttatacttcaagatccttctctgcaagtttctccaagaaaggtgtgttctttgcactagtcacactgtcagcagcaatgtaataaatatccttttgatcaggtttcatgttctcaacatattcatccaagctgatcagttcttcatcactttgggatgaggaaaaacgaagcaatggagcaatacgtttgtgattctcacggtcttcaatgcaacccaattttaagtgtttgccgaagttctcccagaacttctcatagtcctgcatacagaacaagtcagtcagtaaaatttaacaggaaaaaaggtcatccttttaaaaagagcttaagagaagttatataagaaagatcaaaagccactgataggatatatataaagttgatatatctataagataaagccacctcaatttatcctagctcctctacaacttaaagaaaaaatgaaagcaaactgtatacagttaacaattttcaaaataattatatacctctttgttctcactcatggatattcccagaatcatgtcaaaagctttacgaacaagacgtttcctcataatccgaaccttcaagcaccacggagtaaaaaaattaagcaagatgaaactggtaaggaattttatgagtgtatcctaaacgagagattcagatgtaaagtgtaagaatatgtgtgttgccctatctacttactatgcggctctcttgaagaatttcccgtgacacattgaggggaaggtcatttgagtcaacaacacctttgacaaagcttaagtatcgggggaactgtttaagcaagcaaaacattagtgaaggataaaattatcagaacaccatccagttattcaaggttgtagatagcaaagtgcttataccagttctccatcaaaatcatctgaaatgaacactctcttcacaaaaagtcttatattcttggtcttgggattgattatgtcatcctttccagagggagcgaaggcaggaacataaagtatagatctaaattctacctcaccctgcaataacaaacatcatccacacatttgtcaataaaaataaccaacacaatattggttgtcaaattaacactatgaatctcctatggacattggagaaaaattgatgttctcaagctatgtttttcagctgaactcaacaaataaaaaaatccactacacacaacaagatggcacttgagacaattaaattcttacctctgtggtaaagtgtgatgatgctaatggctccaggtattcattaaaagttttcttgtagaattcattgtactcctccttagtgacttctttaggattacgaagctgcataaatagagtaatgccacaatcttcaatcgagtaataaattttcaatataattgcaaatcatggaattggaaatcataaaactcacccagattggttgggtgtcatttgtcagctcccaatcccagtaccgctcaactacagttttagttttcttctttttctgtcataacaacgtgtcaaagactcagtcatgagtcaatgagtaaatttgcagaagctacacaatcacactttcacattcaacaaaatacttgattcagcatatatgcagaacaatcagattgtcacctcagtcttatcatcttgatcatcctttttgtcttcagctgtatcgtcgtcaacttccacctggaatgagcccaaaaattaataaaagctcaaaaagtcaaattttacaatctagaagggacgaacttaacttaaaatgaaaataatacggtcatcgatactgctatcaaactgaaaaaatctggattgtagagccatacttctttggtgtatcccttttcctgccatgtgtatattggaaatgagacaaattgtgaatagtttttcacaagcttctcaatccgctctggatgagcaaagcctttgtcgtccttctgaaagatagcgataggcaaaaagaaatcacatttttaattaatctcaggaataaagaaaactaaaaaatatttgatggtcaaaaaaggaaattatcagcatgccttaagatacagtgtaaggcgagttcctcttcgaatcagcttctctggatctgtctcctcagatattgtatacgagctagcatttgcctccccttcccaaacatattgcttatcagattttggactctttgttgagacaaccaccttcaaacaacaaaaaattatataaataccatattaaacaaaaaaatttaagagcatcacatatttacttttacaaaaatgcatacccgatcagaaaccagaaaagcagaataaaatcccacaccaaattgaccaattaagttgttgtcaccaccaacatccttgctatcctttagagccttcaaaaactttgcagttccactttgagcgatagttccaagacaatcaactagttcttgcctagtcataccaatgcctgtatcactgcataaaaaacataagttgcagcaccaactgaaatgacaaacattaatcatattcatagctatttctcttacgtaatactgatgatcccattatccttatcagcttgaattcggatatcaaaatcaactgcgtccttcaacagtccaggctctgttacactcagaaaccgcagcttatccaaagcatcacttgcattgctgcaaatgaaaatgcatagataaatagcttgacaatgcagaatttcataacattcaatcaataccaagacacaggcttctctatttttggatttttcaactatctttttggaaatacttttccttcaattacttgcagcatgtctgcaggaaatcatacatgatacacaacaaccacaacagcgcttaaaaagggtgtagataaatatatttgcaccaattaaacacaaaacaaaaatgctctatcagacaagaaatatgcaaacactactcaagagcaaaagagcatacctgataagctccctaagaaacacttccttgttactatataaactgttaacaatgaggtccatgaggcgactaacctgccatagccaaggatgcatatatattatcgaaagttaagttatgctcatgacactagactagacatgaaatagaatacctcagcttggtactcatatctctcggcggccgctgaggaagaagattctgcagcagttgattcatatcgtttgccaaagaacaaatcccttttcaagtttgaggaatcaattgtggatttatcagagctcataatagaaaaccatctagctgctttggtgtcattttcacccacctgtgactgtgattgtcattcgagaacatcagtaagttacactacataattaattaatgttatctaactgaaaaggaaatggattggtagcggcgaaagaatagtagggattatgatatgaagagtaatttgtaaagcgaagagagaaagaaatgagcaccttagctgctaagtgagaagaggaaatgggagcaagcacgttccggcgaagtgcgccgccaccgtagcgcagcaaggcagagcgagtagtagtagaagaagagagtctctgcatcatattgaattgaattgaactaagagagagagagagagaaactgcgtttgtttgtaagaaaatatggtagtagggttttagaaggggtttgcttgcttcgatcgaaaaatggcgttttggaagcttctcgatgcagctcgtttccacacttccctcaacaatatatttcccgtttcggtttattttcttttttcatgcctcgtttcttttttacttaatttgtacgactattataatttgtttatcctccttctaagtatataagtgttcggaattctttattgtaattcaatatatttttcattttcataaaattaaaatatattttttaactcaagtaagtttagataaatttaaacttataaaaaatattatattttatatcaattatatatataatcaacataaaagatattaaattgttatattaattatatatatgtaaaaatttatcatcctaagtttgaatttatttgaatctatattatataaaaaataatacattttaattttatgaaaatgaaaaacgtattataaattttacaaaaataaattttaaacatttttcatattcaatgaataccaaaaatatattttagcataataataataatatttataaattacatttttaatcaaaactttgattgcgatcatattcttgtctcttgagagttgagaccaattttctttcaaaataaataaaacaaagattggaaaagaacatctcattgataaatgaccatggtgggagaaaggaggctttcgcaatggcccaggagtccaggcccgttagcattcagccaggcccgttgtcctgtcggttatatgtcaagcagacaaaacttggttgggtggtggatggagtctatgattattgaattggaggcataagtttttcaataaaagttcgaagaaataataaaattagaaaaaagaggcaccaacaatacttagtgtacagtaaaaaatcgaaagagtgaaactcaaatattgtatatgtataaatgtataatgcatagagttgaaccaaaattggaattgcgaatcttatataaactattttagtgtaaaaggcttgcttcctatcatacttaagaatgtaaaataatccaaatgtattgagattgtttttttacaaacatttagtataacagaaaaacaagccaatttgaaaggctatcattggtaggcggacaagtaagcatcccagtgtgattggggagagaataaggtaggcgctgtgaatcaggctattcgtggatatattgaattgttaacatagatctattaagagaatcagagaattactgcacaaccttaaatcacatacaattttattcaatcgtaattattcaactagatcctcaacgtctaagaattttcttaagagttgtccactaagcaaagttttcaatagttttagagaaatatctttggtgcacataaaaagattaattaatgatttatttgtagatatttactcaattcttgtaattgattgtacttaatgaaaaaaaattactgttagtgatgtatcttaaattttgaaaaatgtttaaatacttatgaataaatatcagaatttagttgttatttttaaattcaaaatattgccaaatatttttttaagaattataaatataataagatatcatcagtatggcatgtcatatagcttctacctttttaatttctgaagaatatattaagaaatatataagtccaactaaagccaccttgggatactgccaaataaataaagagcacaatataattgtcgtgtttgtatgtctcaacgcacgtgtttagacataattataagtaggtgatttgatattggagtagagcatgataatttcatatttctacaaaatttatttaaaaaaaatgattttgatcagtatagcaatcataagtaaaaaaaactaattgcaagtttggaaatgactacttttgaggaaataattactgcacctattttagttttctcgatgaaaataaatactatttctttaaaataagttaaactaaatacatataatttattactgattttttaaaacaatttaaaagctttaaactttaataaatatacaataaaaatgtttaatgccttttagctgtcttaaaaacatttatttttgttttcaatgaaatgcaaaataatattggattaatgtgaatggatcaaattttcaatcttatgcaaaaaagaaaaattatatcagtatatcactaaatcacagttcatatatgcgtgtatgttactttaggtagtacttttttgtaataaaagtattaaattaaattatacgccgataagattattttaatttatatcaatttgtcacttgataataacttacatacgagtttatgtaactttggtactacccttttcttctctaaaataagagaatacaaattaaattacagtagtattaaacatccaagatatcaaataccaatttaatatttgaagagaacacgattctgtgaaataaagtccagctacaattgagttacgttcattactgccttcttgacatcgatcaagccactgcaaagtactgtattctggcctataaatatgccgagttatttttgtttaggaaaggtcatatacaattactaatgtcatatgtcattcacataccttcaagggggaaaaagaaaagcatcactgatacaaatcctccttgattattgatacaaaatgatggagatcgaacagagggttattatgcatctattatacaaggtactagctggggaagcaaattaagacaaacagtagtaaatatatttacagatgaagggaagtatcaacgtctgaggtatcaaaatttcttgatgttgatgctccctgtggccataaattggaggatggaggtggtttcgtgttcatggtgttgtgatgaccaccttgtttgtttgtggagttgaggccaagagaaagagagtcatggagggttggcctatgtggagccaccaaccttggttgttgttgagagttttgtgatgatgaggaggtggtctcagatgacaagagtttaagaagttgtttcccctctcttctttctttcaccttctccaactgtctaaacctttcttgaagaagagcaatggaggagttcacagtggtaggactaggatcattaccttgcctacccatttggcagtgagtaaaattttcaatcaggtgtcttctttatattttggtggggtttggcatgtagtggtttggaagtgcatgtataggagataatcatttttagctgttcatcgtttattttattcatttggctccttattgattcctgatgatagcaacagagattagaatcgactgctgttggagaacatgccaaatagataattgctaaaagttagtataggggaaagcagggtcgctggatgtgtggccaaagggactttttgaaggaggaaaagggtgagaggtagagtccaaattgatgatgctgagtagcatttggaagggagtattgtggagaataaatggttaggtaatgcaatgcttatctgggaggagatggtacttctttgtttgatcttgctggtataatacccctcctttttaataagcattaactgttgaatgcactattcttgttttggagctggagggagagtgtggtgctgtgcacaagagacaaaaggaatagagaaggaatatttttggagtttgccatcaatgattaaattagtcctaatgtagtgtccatgaaggaaagacagacaactcaatctacggtgtaagcatatgttttgtttaacgatacactctagctacttttaaattctagttatagttgtaataaatttccatatttttccttgtggattttgggttgatacaaagccataaagcttagttttgtgaaatgttaacctggcaagttgctaaattcatgtctcatttttttcatctataacctgtaactgtaacttggtagccttcatacaagtttgtgtttggaacgaatttgattgtttcttgaccaaatgctggattgttcaccattcttctaattaacattgagtctttaggaaaggaaaaatttgaatattgggttgtgaatgggttcagtggagctaacaatgtatatccatgatgggattatctttaaagatgagatattttttgcaattttaatggttgtggtcttgtggagtatcaattggttatatgcaccaagttgtggtctttgaattgatttgtgttttgttaaatgattttaaatgggttttgatttgacttgtaaacttggaagaaatgagtaggttaagtgttagaagacaagccatgcaatgattgtttctcttacaattgagtaccaattaaagaatgagtaagaatatggctagtttagttggatggtaaagttggatataaaatttcatcacatatcttaagaatacatgcttatatatgcttatatgcttaatcaattcagtgaaatattaacggttacggttagttattcgaataaacattaaattgtaagaaaataaataataaaaatgaggagtaacttttttactctttaaactagaacactaaatccgtgcaaagcatcatgtaagataagagtctcagtcacacaatataaaataataaaaataaaattagagaaaaaaaatctagagcttttataccatgtaatatactatgtaagggagaaacaaattttactattttacctaaattttcttgagtaagtttttcagtcaacaaaatgatctatatgagtgtgtttgggatagcggcacaaattaaatcatttcaataatcaattataatcataatcaatttttgtttagataagtttgttgaaaggtgattttcagataagtaattataagattaatttggtaattaagaaagaaagaggagaggaaaaaaatcgtggatttgaattctttcattaacaaaaattaacaaattactcccttcatctcaaaaagacttatatttgaagtattttcatacatatcaataaagtaagtatttcaagaaaattaatatatattatgagataattttactaaaatatcattgttttttctctaaatttcaataaatgtattattaaatttttcaaaacagtattatttattacaagacaaaattggaatagatatttgagtatctccttgaaaaatgaaagcatcaattaatttgaaatttttttaaaggctacgaagggagtaataactaacattgaccttaaaaaaagtgattttaagataattataataaaaaccgattacaaagatactccagagatacattgaactcagctaaacacaataactaggcatgttggtagaaaagtaccaatcattaaatgctctcctatttccaacaaaaaggtacagtaacgggtttttaaattgttgccgggtcgttgatcacacccaggaaatcatctttcatgcagaactgcaaaaaaaaaaaaaaaaaaaaaaaggttatgcattatatcagttaaatgagttctaaaaacattgaaactgaaaatcagataaatattcaatatccaaaggaaaaagtaatttgtatctctttatttgtcattttaaaaacatgacagtgtcacagttcatatctatagtcaatacaaccaaacggaaggataacataggctaagcatgttcaggagtatttaaactttattagcatacaaactagtatcatatgctcgctaaaacttccattaggctacaaggccatagacaagtgttcttttaagacatgttcacacatggcatacaacaataatcttggcaggaacaatacagtcaaacatgtaacatcaacaatgtggtaaacataatatcattctcattgcatgcagtaactggagaatttgtgatcacaattttctcacaacttttgtgagtcaaaacgttcaagattttagaaatgaagtaaagctgcaccatggaatagtaatcattcttgcataccacaaaagcacacggtaaatttataactccctcagggtagcaaataactttgcttggtagtaaccctaatattccatgtggataacttttgaaatggataaaatttaaatagtgataaaagagttaccaacacagtaaattactagctaacggagcataaactagcattcctcaaatttctttactattataaattcctccacaaatttcatgatatgcacaaatactagggcgaagccagtgatcatgagctaaatattaaaattagcaaaaattaaaaggctcttctgggaggaatttataatagtaaagaaatttgtggagaaacaaaagctatatttgccactgagctaaaaatgctttcctattcattcaaatttctcaaagcagaatttagcatatagctaggagttataaggttgacttgtaggtgaagggagaagggagaggtggtgggttcaaatccctcccactaacattctaacaaaactaacaactaacatttgcctatataaaaaaatagaagaagcataaattaagctaatggagcttaacaacattcaacaaaatgaagagacataatatatatagaagtacaatttcagtagcatccactggagtcccgattatctttagtctcacttcagtatctttttgaatcttaacttgcaaaagaccaattgattagtagtaaaaattatcataaaataaaaaaaaaaaaaacaagacaaaaaaaaaaaacaatttgctctcttcttttccattgaggaagttataattgagatatactgatccatctgaagtagtgtaatttggcatgtctccagactggaactccatatcacccggaatcaactaagtggggcaaaaagggtcataacaaacaaaaatatatataaaggtaaaagtacaactacaagttgaaaattttccattgcaaagtaatggcatattctatcttaaattaatttaaaaaaaaaaggaacagaaaataatcctcggtaattctaaacattaccaatacaaggaataattggctgacaatgatcatcttttaaaaaacaaacaatacaaggaatttttcctgtgtttatgaaaactggaatcatgcaccgcctttttctatttggccaatctcaaatttgcacaatcatctctattctggccccaaaactgttacattaaatagttacagaagtccattacataattaagtttcgagctgaataattcatttcatggtcaagatcttcacgctaataaaagtcatttatcttggaaaagaaatcagataggcataaccttaacccatgctgtatgggtacaaatacaggtatatgataaggatacatcccatataacaatacataataataaataaatatatatatttaaatgaatttatctacatgtggtcatcctatcctagcccaaaatcctgtcattcccactctcccaagcccctatgtgataatttggaggaatggaggctcccaagcccaaaataatcatgtaacccaaaacctcatttataatattttgacagagtaaaaaacttgcattgcattccaatagcaacaataataaataacaaacataatattggctttcaaaattgaaaacttgcctagcattccaatgacaggaacaataaaggaaaaaaaattaatattcaaaatgaagaacaatagtaacaatcttttagatatataacatggagataatagagaccacttctcaaatattacaaaagacaaaaacttacgtggtttgaaacaatgatttggacaggtccagcttcagcaaaaaatcccatctacacaaaaagaactcaacagtcataaaccaaaatctccagaagttagagttacacagattgattactctaaagagaaaggaactgtataaaccttgttcaccatggtaacaacagcttctatgttttctatcacgaattaagcctggaaatggtctgaagacaacacattggtacttaattggaaatgtcacaaaccctgttccatcacaaattaagccttttcctattttttctatccctgtaaccgccaccacaaatccatgtctaccactgcataataattgaaaatccaaatgttacatccatctaaggtccaaatcagtcacttaaggataaatacttttctctgatctaaattatgtacggtccaaacaaatgcacaagaaaaattactcttattaacatgtattactgggtagtgggtaaaaatcaaaggctcatgccagagggcaaggatgagatgaagggttcttaactcagagggaattgagtccttgttacttgaggttggggtattgtgattattttggtgttactttattgcaattgcagatgtttctatcttgaggtggcctttcaagtgtacttttatttcatgcttcattgtttctttaagtttaacaagagagagaaacccaagacaaagttagcacttattcattgggtaactgtctgctaactttcacaacttcaagcatcttgaaaagcttatcattgtcaaaggactcaagttaagttcagggagtgtataagagaaatagtatggttaactgattaactcgcatatttcatcttctttcccattttagcacaactcattttctagtgggaaaaaaaaatattgaaaggatcttaaggggaatcacctgcaagtgccttccacatctttcattagtttggaaataagattatcacgaaggttacaaccaaagtagcgtggatgcagctgcatctttcgctccagcactatgtggaaaaacattttcgtgtttcttcttgtcgctcccttcttgcccaatctggaaagctagttacttactactggccaaaaaacacagaataagaatagatttggaaaatacaattaaaaaagctcaaatgcatgtattagaatgggaagtaatgcatcactaatttttattacaaaaagtaatattaccacatacaattacgcagaacccactagggtcggcctagtggtaagggattggaatagtgtgcatgagatcataggtttgaatatcagtgccatcattatagacacacaacaacaaaaatatacaattacgcatataaaactgacaaatggaaaatccaatgaaagttatgttcaatattcctgattgcactgcgaaacaaagattgttacactaaatgccagcaacagaacactgaacaaaaaaaaaaaaaaaaaaaaaagccttttaagactctgctcaagcaaacaagcactctggatccaaaatgaaggacaaaaaaatttcaagctttggcacacaaacaagaataaccggaagagaatgcacatttgtgatgatgagcagttacagtgaacaagaagcagaatccagaagagaagccataataattttcaaaggaatgagatgtttagctatgttcacactctcacgtccacgcagaaaagtgaaaacggtaaacttcaatttgagtcacccttcccgaacctcgagtataatccctaaatcccacacaaattgtaacttattaatttattcaattattaattatatttatatttaacagaaatttaatttattactaaattaacattctttttttgtaaaattaaaacaatcaacattgaataaataatccttactgattatttttcttttttatttagcatgataacagaagggtatttaaattagattactacaatagataattcactagggtcaacttataatgaaagggtcattaagtttaagtagtttgcaagacagtttaggttcaaactttatttttgtgtacaccaaaacatatcgctgcaacccagaacttttaatttgttgctttacattctcattggttccgataaaaaaaaaattaaaaaaagaaggttagtattgagaaagaaattggtgtaaaaaaataagtaattcatgatttgatttcacaaaaaatgggagattaaaaaaatctaaaatcgtatactatttgcattctttccaaatgagtaaaaagaaagtggtaagcaagagtatgttgttttcttgttttcaaatcatagcttttgcattactcccttccccttcatcacttctttgttttttaattttctcatgactgactacattattgacgcatttagatggatacattgaatgcccgcctgctctttctcttgttctgggctttggatgttgttggtaatggaagatggattcattcgtttatggttttaatcatggttttgaattggatggtgtacaaggcacgtacatcactaatagatagattccttgaacatggtttcaatgtttgaactaattaacatatagggaaaggtggttcctgttatgggaagatagaaaacaatatgtaaaaacacaaaccaatcaatattctgaattccaaacgtaagagttgatattttctggggacccaaatttctaatatataaaaatataatggttctcatacagattcttctgctacacaggtgtagttacattagtgaaaatggagttaaacacaagggaactgcaaaagggagcagaagattgcatggaatgttggcatcctcattgtccagggacaaagttagtggcataagcccaagcattgttggcaacaggatcagcaacgtggtcgtaaaggttctgaatagggcccttgccagtgacaatagcctgaacaaagaaaccaaacatggagaacatagccaagcgaccgttcttgagttccttgaccttcaactcagcgaatgcatcagggtcatcagccagaccaagagggtcaaatgcaccaccagggtagatagggtctagtccttcaccaagtggtcctccaccaactctgtaaccttcaacaaaccccatgagcacaacctgaacagcccagattgcaaggatgctctgagcatggataaggtttgggttgcccaagtagtcaagtcctccctctgagaagatctgtgaaccggccttgaaccacacggcctcgccgaatttgacaccattcttctcaaggatctctgggaaggtgcagccaagggcaccaagcattgcccatctgctgtgaatcacctccagctcccggttcctggcgaaggtttccgggtcagctgataatccagcagtgtcccatccgtagtcaccagggaattctcctgtcaggtatgatggaatctgctctgagaatggacccaagtacttgggacggtcagggccatacctgttttgtttttcacaacacctcatccaaagtcagttacattctcagacaaattgataaaacctagcttcatatgtgttagttagctgatgtttttttttttttttttttttttatctttataagacaagacaataactattattaatctgttatgcttacataatcactggctttctagttagccccatcctgctgagaattgttaagtacaaaacatagatatagttctatagatgcttttttggagttttacctcattgataatcttaacatataatgcgaacttttgttacatgaattagtgagttaaaactccagttttaattccctccatttcaaattaatagtcgtctaaagattcttttagatataccaggataaaataataaatagataaaaattaaaatgacaattattatagaataattttttttctcgtacactataattataatgggacggaagaagtagaacagaataccaaaaacaaaaggtattgcatctaagttttgcggaattactagtattaatttatgttgtcaagcgagtattatattaaaacatgtaatactaagttgaactagtggagtgggaagggtaatgttgagttaccaaatgctctgaggagcactcttgacggtgcggcgcatgttagtgcgacctttgccggcgccaccggtcttgcggacgaactcattgacctgcttgagagcagtttgaccagcgaatgctgattgctgaatagcagaggtggccatgatggttgtgttggctaaggctttttttctttggttttgttttgtgttgtggagaatgaagaaggctactacaaaggtttatagaagatcgtatgatattgtggatcaggatatgcacaactcagcaacacctcattggtcgtggatttggatgtggattctcatgctgatatttcgacatgctatagtggctcttcttctgccacgtggatgcaaagatctccttcctcagatgttttcgagagggtcgatgtaagccacagaattcaggtccaacaaagtcaagaaatttaaattaaaacttggaaattggtatggaagatagtttggattgggctgatgctacagtaacagtgcaaacccgtgagtgactcattacattttttttcttctttctttttttatttttgaaaaaatgaaaaaatttgtgttgctagtaaaaccacacagaaacacagggctagtagtgcctcgacctcaagaacacaatgtggcagctcatcttcgctacattacaaatttggtttcatgtggaaattatatcttaggattttagaagagataatgacctctttaatttggtgtcaaaatcggtctcttcaagcaaacagtttaaaaaattagtatgaaaaatcacgaatgaataaactgtacatggttaaaaagtcgttgaaaatagaaaaaccacatttgaaatacaaaatttataactattaacttttaaaaattatatctaaaatgtgaaaaaacccatctaaaatgtgaaaccaaacatactactagaagttttagattaaatttcaggacggtattggttttttaattaaccctcaatatcataatcaagaaaatttgtatttaaatgagaattacggtaattaagaaaaaacaaaataaagcagcttaactgaggttaatgttctatttaaatattcaatcacaaaaaattaagaaaaataaatatggtttaaatgaacaactgacataattaatagaaaaaattgatcataaaatattttattcatttttaaaaaaaaatatatatgtatatatatatatatatatatatattacttatatacaatatttcttaattatattactattataaattaaaaaatagaaagatattgaattttagattaaggcctcgattttataataatttcattaatcttatttattgtcacatacatgacaatttcctaaacataaagtgtcttgttgttatagattcaattttattatataaattctacacgtggtaacatgtccactatcgcattttataatatgtaactatttataattttaagttatcttttaaatagttaatatgtcgtcatgtatagcattgaccacgacaagagttcatatataaaaacacagttctttaatagatgatatttttcacagaaagtgtgaatgaagtttcattgaaacattttcaaagctcaaaatataaataatttatccactaatgatcaaacttcaaagctaaaggagtgcagttcatacttataaaaatcaacatcatcccgaacaccatctgaaaacacacttgcctgcatcatatataaaagtaattaattagcatatctgaaaggagttctgcaattactttttttttaccatatatggaatcatgaaaaacgaagctaataggtaacttcggcttacttgaaagctttcgggggatgtaagtttatttgaatttgtactctaaggcttcactttagccaagaaagtctaaactaatttagtttatcttttcattttctttatcttcatttgctatttaatttaatcttttgcctttaaaaaaaataactttttttttgttctaatcttttatcttttttcgttgtttctaaagtaagcttttatctatttcattctcgttgggtatatatatttttaaattttctctgatatttaacatgcatatgaaatttgcttaattggtttctttatttttaaattttcacttatattaaacatgcatatatagtttctactttttccatcttcggagacatgcaaaaaagttttaaagagagtatataaaagaagaaaaataagtccaactgagctacaaaattcatacggctaagctaaatgattcactttctacgttattattatcacaagactttttataaagcaaacttgacaagtgatgcaaaggatgggaattgagttatggagacattgacagaaacaagttctactgaaaatatatacaataatagattagaaacgctaacgttcacattaattctctgtagggaagtgatggggaatcaatgaagcttatctacattcggtagtacaagcaaatgattattctacaatgactacaaagaaaggaactgccacaaatgaatacatacattaacattacatatgcagcaacattatttatacactgactaaagtcgttgggcgtgtcaagttgatctgcctgctctaacgaattgtcatgttcatgcctatttgactaaaaattagtcctacagggaacagaatgaacatcagaattggaaatactggagaaagatagaacgaaggtgaagtaattgattctgaagcaatgttggtgctgggattgagaataactggaagaatattcttcaaggtccattcaaatacgcatgcaagagcaccaatcaagacgcagataccccatctcgtagcattcagctgcatgcaatctgctaggcctttagcatactcaatcaccagcacttgcataagaaaacaaccaactaaggccaccaagaaatagaagctctgaacaaccatcttcagaacctggttgttgagaaaattgcagagttggcaaaataggaatgtgttgaagatcatggtttccctaacctttttatccttgccagtaacatgtccaccgaactcaagtatcattgacacagaagtctgatataaaacctgaataacaatgtttttccagatttctttggttataatatgttggttcctataatcagatggttgtttagcaatccgttcctcgccggttagcctcaataccatcattaggccacccagaatgcacatcaagacattcacccaaatcaactgggatgctgcaaggggggaatctccagtacatgttgtaatcaaggttatgactgaccctgatatggtacatgtcagctgaagttgaatgaacttctgaatattgtggtattgacttctgccagccatcacaattggttccaatacactgaaaaatttgattgttatgtcacaactatctatatccactattgttctcagaggatcaagaactatccccacatcagctacctttagaactgaagtatgattagtcatcaaccttgttccaatgaatgcaaccaccttacctttctcttgcaagcactgtatcatgagaagtttgtctttaggatggaagcttcccattacatgggctcgatccactttgtctaatctagcttccccattcaaatcccgaagctcttttccttcaagcacattatcatgttctagtcctagtccacaagctatgcctttcacttccatgatgccatcctccgagaccagtttgatctgtatatttgcatcattttttttcagattttccaaagctgattttatggattctagactagtagtgcatttgagacctatcagtcctaacaagatcagttcttctttctcaagttcttctccatctgtttgtctataagcaaaagcaattggctcaaggccaccatcctccatctcttcaatcacctgcccaaatttgatcttttggttttccatggcatggcattcccctatactatcatagtacagtgaacacatatccaatattgtggatgcagctccactccagtgcatgtacagaacttgttcattgtccccaatttttcttaccaaaactccgctaccttctttgccagaattcagattgctgtgcttaagaatgtcaaatttctcttctgtgaaagatctcaagttcacttccaatgttgtttttgcccaagaaacaagtgaattagacaaagaggaaagagaaatctctggtgcaaggactgataaaccaactccttgtttaagcatgtcaagcgcagttttatctatttccgatccctcaaccatgctgacatctttctcccccatccatactctgctaacctccattggtttagatatgagctcacctgatacatcaatgcagatgacagttaccaaccccattgtcgtactagctgataaatcatttagaacagcatcttggtttggaactaccttatccatctggtacttgagagaaattgtaaccacaagtggcattccatgctgcacgcatagtattgcaacagtgacaaggcgtgttaaagtggaaaccgttccttggggtctcaagaaagctctctgaagtgccttcatcaacaagccaattgagaccttccccttcatttctggcaacccactattgttcccatcttttccacatattaggcgaacgaagaccacaagtaaaaccagtagagagataaaaagagcagctatgtcaacgtaagaaattggcttctcgattagttgctcaaacaagcccctcctttcagccaaattggtgttggttccaactgatgttaccaccatccttccctggcccccaatcacctttgaaccagatataagaaacgggttccccttaggatcatgtttgctttttgttgcctcaggctcagccagcataaggatgccatcacttacaagcaaaccgtctgctggaacctcatcacctggccacaggcatactctgtcaccaaccacaatattagatatgggaaccattacgatctcttcacctctcttaaccctgaattgcaactcgacctttgtctttgccaatttcaacattttcctctcacgccaaaagtttgctactgaatttactacaaccagtagtaaagcagcaaaaactatagcaacaccatcatgccaaccatgtttgggtccctcctgcttgaatcctatggcgaatgacaacccagcggagacgaacagcaccaaaattgtgcagcggtagaacttgcagctgttgaaaaaaaatttggacaagtttgttccaagaactggtaatggtatagtggtcttgccctgttcataaaaacaaaatcccatcaacaaaacacatctatctcaacccaccacaaacaacagttagtagatccatccttcttcacacttcaataaaccgagaaatttgatggtttaaactagaagggatcctccaaatatcataaccaccatgtggatgaaaaaacaaaagaatcactccctctttaatgtttttccatgtagtataggagtttagcaagaagttgttggtccgaatggaactgagctcagattccttaaacaagatctcgaattcgagttttgtggatgaaaaaacataattgagagaagatatctcactaaaagtgatcagtcaggttcttttgtagaaattaatcatcagctaagttggtgaatcacacctataacatgataacccaagtttcattatttttctttgtttttattgttgaagaaaagggcatgaatatgaggaggggagaaggttgatatatacctttgagtattgatgttgacgaccaaggacagcggaaacggagtcaacgccaccaagctcattgagggatttcaagtccttctcctttacaattcgagcaatatcactcctaatgtgctcttctctttcttcttcttcttctatatcaattgcaactgaagatttggaagaggaggttctagcaggaggtactgaagtgtacggtactgaagaaagtagtgatcgtggcgactcatgtttgtcggtagaagttgttgacttcttgactgagatgaggaatcttatgtataaacttctacgccatattctggtgtacttgctgttgccggtggtggtgaggagtaaggtagcaccaagttcaatgttggcaccaccatcaccaccaccagctgaggacgaggttgcttgggacatgtcttaaatatgtcacagttaatgagattggtttattgataaaaagaaaaggaagaaaaagaaaggtgacacttaattcgttatttggacacaatggttgattggactgtaattcaaccggaacaaagcctacgtttcttgttctcaagatccaactagagggttttcagacactcatatcatcttgcaattacacacacaaacacacacgtggtttaaacaaggaattatgttacacatgatggggttatgttacaacacggaacaagtgtcaaagacagacactatagagaaaggttagtgattgctcaaattagattttgatgatttcaagccaacaaagaatggtcaatttatagcgtccaacttggatcacgtagcaaatataataaaactcaagggtatcgctgctattaaatgagtttttatcatggatcaatgggaatctgccacgattccaaggcataaacgcgtacgtagcagggtggagaaaaagtggtttgcccttgcccttgcccattatacgcaaatttttatgttcaatcttttatcggccacatgccggcaacccccacccatttggaaattataaggcaatttactattaccaaatttcttcttcacacgtcatttgcatggtttctagaattctttcacgatacattgcacgcccaaaatagaataaacaatatttcttttttcattatgacgttggtgttgtgaatttttttttttctgattacctttttttttcatttataagaataaaattttactttaaaaacgaaatctaatttcactcaaatcaataagttgttagtaaaataaataatatatacatcaatggtgtgtaaaattttttcggattgttatttaatcacaaaatattatcttcacaaaaaaaatcacaaagtagtattatatataataaatttgttgaatttttatgataattatttttaaaatcatattaaagatgatttataattaattgatagtgttcaaatttatacacaacaaatgttttaaggaaattattttaggttttattttgtcggaaattaaacatgcgtggaatttcaaagttaaggatatattaaattatataggactccatgtcatggaattaatttttttcttaaatatgcctaagaaaaaactacaaactgttaaattaaaaaaaaaaagccctaggaatttgatttactaaattgatattttgaaccgtaaatgaaaaggaaaatgaataatggttttggtttttgaaaatttaatacaccatttctaatttatcattacatatttattagggtataaataagtgcggttcactcataaatttaaattgacccaaatcaatccaaagaatttgggttgaataatttttgtatttaaatcagactcaatatcaaactagtcaaattttggattggatcaagaattttaatatttaaactcgttgacatgttaattgattgatttgagttgatttttttttttaaaaaaatcaatcaatatcaagtcatttaaatttgatttgatcgctttacatcatttgaaatttttttctttaacctactaaattttcgtttgtgatttaaatccgtaaataacttcttgactaaacctttgatgccagcttcaacatgtcattagcatcatgtcaggtattattaagaatacctcctcgttctaccattttacatataaaaaaatgataaaattttatgaacgtagtacttgtccaatcggcatttaaaaaattatatataataataataacaacaataacaatatgggaagaaaaaaaaaagacataaaatttattataatataaaatatatgaggtcatcatcatgtagtaacaaagattttcactattaaattctaacacgtatgtgagcgtagattgttttcttatatttagtactttagttttcagttaatttaatattctagataatgatttatgtaataagtcaaatctgcaatggaaaaaagcatgctggcctctatacgttttggactattcgatctcatttctcagccttctctcaatctaagataaatacaaaatttattaaaaattacaaaattaatagtgaaattcattgaatataaagggaaacctacaaatttttatgattttcaatgctaatctttctcccaatcccgaatgagaaggtagattgaaagttctttacttttctttttttattatgtatgctttttggaacagtaatgacataccaacattatattattttaaatattttattaatatttatattttgtttatttctttttatcatatctcctattaattatatatatatatatatattaaatgtcttcaaatgtcaaatagattcgtgctattcacatttttgtttgttaaaaaatcatttttgttttgggaatagggagccgtttcttatgcattatgaattagggcatgtttgcattaacttctccaaaagtatttattagagatgcaatgaaagaaaaaaaaaaaaaaaaaaaaagcttttccatgacattgtgaataggtccacccctaaattttaatttcatgagataattaaaatttattttataaatttaattattattaaatttatgtcaaatgtatttaatttgtgttttcctatttcttttcttgtgattttgttctttctattttaaaaaatccataattttgttcacttcttaattttatatagatttttttacactttaattaattggattttttttatgatatcttaaataaatatgttaaatcttggactcaaatagatcaaaataaaagaaataacacatgcaaaattaagaattgaaccaaaatcatatattttctaaaatagaaaaacaaaaaaaaaaaaaagaaccaaaattgtaaatcaataattaaagtggaaccaagattacaatttaatctaataacaacaataaagatggataaaaagaagtagagattatatacatatatgagattatcaagtaacacgtttgttgcttccttatctttactaatttagttttagtttatttaatattctagataatgatctatgaaataagtcaaatctggaatggacatcaaaagcttgctattcttctaaaaaaataatcaaaagcttgcaatagtgctggcctatacgcgtttggactattctccgttacgtctcaatccaagttaagtgtcagttctagcttacacactctaataaataattgctatatgatcgaagtgcttggcattgctttcttttgaaacatcctttaaattgctgcattctccaattctcatctaacttcatttctcttggaattttgcttgaagaaataagagttttgttttcttggcaacatgttatgggatgataattgcacttatggagtcaaataagtacgttttaagaataaatgtttaaattatatcgatctcataagtattattatacaaaatctcatcaatcaaatcgtttttttctaaaaaatatgagacatctaagtcatccaaataaaacaatctatttcttgataagaaaaataaaaaaaaaaaatgtgaatggtgattgaattgatgataaaatagaattttgtgaagttcctggttatcctaaatggcaactgactggattctatggttatcatgaacgtgatagaagataagactcatggaatcttctatgtgctattgcacatacttgagtgattggtgcatttttggagatttcaatgatctactttcaaatgaaaaatatggtatcaataatcatcaaaattgactttttagaggattcaaagagattatcattgattacaatctccatgacctttctatagaaggttatacctatacatgggctagaagaagaggaaagcatgatactattgaagaaaagttggacatagcacttgcaactgggcaatggattgataatttccccaattttaggctgctcaacacaatatcctcaaagtctggtcattctccaatcctactgaggcttcatggcaaaaattctaacatttttggagaagatttagatttgaaaatcaatggtcgatggacccaaattttcaatatttggttgaaaatagttggacaatctctttgtccaatgattttcttactaaattgaaggcatgcatagaagatacgaataatagggggaagcaattgcgcctaaaatatcgtgctcaaattgataaatcaccaggaacatatggccttaagccaacattcttcaaaagattttggcatctccttggacctaaagtgcataaagttgcctattcttggttataacaaggtacattccctccacaaccattcttttcatcccaaaatgtccaaaccctaccaccatgaaatattctagaccaatcaccctttgcaatgtcctttacaaaataatttcaaaaatcttagccaataaactgaacccaatccttccaaaatgcatctctcttgaacaagctgcttttgtataaaacaaatttataattgacaatgtcctgctagccttagaaattatccaccacatgaaatgtaagactcaaggaaaagtggggacgtagctttgaaaattgacattagcaaaatgggatttcatgaaaaatggattggttggatgaatctttgtctcacaactgtgcaatattcaatcttggtaaatgagaatcctattggaccaataactattgggagaggactaagacaggtgactctctatcgccctatctcttcatactttgtactgagagtctttctagtctaattaaaaaatatgagagaacaggagatattgatggtgttaaggtgtgcaaggtgctcctaccttttcacaccttttatttgcttatgattgttttctgttttgcaagactcaagaaaatgagattaatactttgaaacatatcttggacacttatggagaagacttagggcaattaatcaatttccataaatcaggagttctctttagctcaaacaccttagataaatgcaagcaacaaatcttagtcacttgggtacaacaaagtttaggagctgaaaaatacctgggtctaccatcaattgtgggacggaggaagaaagaagtatttggttttctaaaggaaaaaatgtggaaaaggatcaatcactggacaagcaagaaattgtcaaagacgagtaaggaaattctaatcaaatcttgtgcacaagcaattttatcttactgcatgagtgtatttcttcttccctcttcactagaagatgaattgcaaaaaatgatgaactagttttggtggggtaccaaaaacaatatgcagaggagtatcaattggatgagttgggacatattaacgattaaaaaagaaaatgggggaatgggtttcagaagtctccatgctttcaatttatctatgctaagaaagcaagtttggaaatttatttcattccaagatgttattgttacaaaagttttcaaagccaaatactttcaagattgtttttctggatgccaaacttgagcataatcctagttttgtctggcgtggtatctttgcttcacagagtgagataaaagagggtatcaaatggagaattggaaatggaaactaaatggctatttggaaactaccatggcttcgaagaaatgactacccatatgtttctacggctcaaccccaaggattagaagatatgcatgttggttctctaatagatcatcaaagatgttcatggcaagaagacttcatggtggaagtcttcaatgaagttgacttgtaggaaattagaagcataccacttcttcacgtgctagaggaagacctgcgagtttggaaattcatgccacatgaagaatattttgtttgcactgcatacaccatgccatatggagctttggagaatgaaagttcctcctaaatttaagcatttaatctggagaattctgaggaattgcctcccttcacaaagtagattgagagataaaagagttctttgtccactcacatgtgaattttgtgaaaacaacattgagtcaagtcggcatatcttctttggatgtgattcagcaattgcaacttggcaagaagcaaaactttggcccattattcagagcaaagttttgtctgtagaaggtattgtccctctcatttttgacatcatcaactttctacatgaaaaggacccatgcaaaaaatttgctactgcactatggcgtatttggaagcaacgaaatgataaaatttggaggaatcaggtccagccaacatagatcacgattcaacaagcatttcaacaacttgaagaatggaagcatgcaagacagcagcaatcccagtcacatgtaatgcagattttaaacaatcaatgtgagtggaagaaaccatcttttggatacttgaagtgtaacattgatgcaacaattttcaatcaagatcaacagtttgggaatggaatgtgttttagagatcacaatgggcaatttattcaagcaaaaacaacatggtttcaaggtgttccagacccaatagtagttgaagcattcggctcataccaagccagggaatggttaaaggagagcaacaacaacaataatttttgtgttggacaacaggcttgtggttgatggtttcaacaataacaacaaaggtttatcatatttagcttcaattctcagtaagtgacagttctaattacagatcgtttgatgacaggtggaaggcgtcactccaacaatggaagataagccaaaggaagatgccacaagggtgatgggcaacccctaatgagtctaaacgggttcagcatgaaacctaaataacattctcataatacataattaattgtctggaaattcaagtttgtccattctattgcaattttgtgtacatacaggcaatcaacctttaattattctaaatgcgcaccattaacgtcaattatgaaggctttaatttctagtggtgcacatgaaaagacatcaaggctatcaactactaaaataaataaaaaaacgaaaaataaaagaagtataactttatttaattctaaaaaaagagtcaacaacaccctccatctcatgagtctttaataataatcatgcactgaaataattttgattcaatgttcttcaacgcatgtacaacttcaagaattattgttaccacttgttgtaggatctcctctgcctttctggctctgatcatacgttcttctagtccttctgttggtccttgaacttaattgtcctcatcattaattgtagggatctttttaatttctttaacaactcattagggagttttgtaaagaggccaacaattttgtggctcattgtcttgcaagaacatctaatttgtatgctagctcttatgtcttctaccaaactccattatgaatgaaataatatacgtctgttcctctataaaaattactataagaggggtacaaattgtttatgcacgaactaggtgcatttattaaaattaaaaaaaaaataaaactaggtcatttcattgttgtctaagaatagaagatttataaataatccatcatttagatgacaagttattacttatttccaattttgaaatagacacctgcacattttgaaatactcgttttcattttcagttaatatgttttcattgtaatgataaaacaccatcctatttcatattctcttaacaaaactttatcaacgtctatttgcagactaaacattagtttttttttttatgttttttgtttacaggattagtatttgatgttatttatactgacatggtgtaattaattgcgatttcaatatcaacaatgttatttgcaaggcattttaattgcgccattctgacacgcttttgttttgtattttttatatatataaaaaatattaatcacaacctttttcttttaccaaacagggtttccggaatggtgtgctaaaatcgtatacaggaagcatctcttttaatatttgcggatttgtacttgctgcatatcttctatccaacaccatttaccaatatcatccaggattacgttgtgattgtgaatgcaatgcatggaagagaggagcgaacaaaaacaactgcatatgccacatgtcatgtactaaacctacaccaacttggattacggttaaggaatgatccttggccaagttattccattggggaaggccctgcttcaattctgatgtcaccacaatgctcgctaccaagcatgattgccattagcataagtttgcctgcaactggaaaatccttgtgttgcatcaagattgtttcgactgaactacccatatcccccaaaatagaagtctccatgttttcttgtctcaaggacaaaacttggtcaaacccttcttcaaatgtttcgctttgaggtccataacacctacttgaagcctggaaaagtatagtatttttcaagttttgcaggatttcctggtcactccaaccttcagttctgtacgaatcatggaatttactccaatcgtcctgactagcagctttcttccaacaatcctccaaaagttttctgtggatcttccgaaatgaggaactagtccatgcaaacacatcaaaggccgacaatgagagttctcgatcttcaccttccaggcacaatttaatcaagtcttctggatgaagcagctgagcttcaacaagttgtctatcttcaatggaaggatgacgtttcattaattcctcctgcaggtaaagcatctaaataagaaagggtaaagaggactcctaaaagggtgcaacaaagcttatttgccagcgcaaggttaaacaagttctcatgaaacaaagcaaatattaaactattaattttattgtcatacagtcacataacactcaatgccacaagtcagtcaatttgattgtcaaacgtgtattctttacaatttaatagcatgccaaatccttcagcaggctccttattttccctccctccaaaactaaaactttttataattcctcttcaatttcatgaataatttaacttcctacaacaactgtcacatcaaacccctcaatcatgtatttaacaacttattttaaagaagaaatttaaacatagttataatattatataaagtataaacttatcatgcaattatatttgtctcatgttattgaaagttatttgtgatcgcaaaatctacccagttcaaagagaagtttttatcttgctacaatataattaactattaattatactttataatgttggtctttacaacgttgttaaaaagcggtcatggcagcaccatggtagattacaggttagatttctgacaggccaccattctatggcagtggcatggtgggtttttgtggcaggctatggtggccgccatggttcagccatatgccacaacaccatcaaccatatttttttggcagatttttagctggtcaatagaagccaccattgataacactgcgtcttaaaaggggtaagatcataagagaaaaaggtgggagtaaccaaaatgagttcaagatagattagtgactatacaggaaaggacaggatatggaatgagtgtagatgaaaagatattggtgtgatacctatcaaggaaaagaacacagaaaattggttaaagtaatttggacacttgcaaagaaagtcactagaaacacttagaggaaattcaagaaggacaatggaggaaattaccaaaaaggatctcatcataaatagaaccctagagaatttggtttctaatcaagcagaatagcatcatgtgagatgtgatctatagttgacctcacctagtgagataaaatttgttgtcgttgttgtatttatatcattatatgactagaaattaaaaaagcttatatacaaatttagtccctgtaagttcgaacttttttcaattttgtccttgtaagtttttttttttttttttttttcctttttagttccttaagattgcacttttcaattttggttcatgtaagtttttttgttcatttttagtctttgtaagtttgtgctttccaattttattcccttagagcacaaatttaaaaggactaaaaacagaatcttaaagggactaaaattggaaaagtgcaaattgacagggactaaaaatgaaaaaaaaaaattacatggaccaaaattaaaaagatgcgaacggactaagttcatatataagccaaataaaaattcaagtatttttagtaacaacagcatctgtttgctcctaacatatcaagttagctttcaaacactggctgatgtcctagagtttcacggatgcctaatactcacgatgaatgattgagaaaataaatcaactccctcttcaaattatcaattgttcaaaaataaaaactcaaatttacctgtaattttagaatcttcaaatcagcctcaatgcggtccaccttgacttgagtaccagcatctttaccagctgttgaacaaaaaaacgtaatactttttatttattgcaaatgaaatttattaggtatctattcattcaaagaaaaattagatatttaactaactaaacctgtgtccagttgaaacagtacatatagataaaaaagagagagagagagagaaagaaatcagaatataaacaccaatctttatccaatgacttgaataccacaaccaaatgtggacaagatataatgcttggtcacatgtaaatatggaaataaatcatgagataataatgaaaaatgggaagtaatcctaagatactccaaactattcaaagatatattcaagatattattagagatttttaatatattctaacacagattaaagatttctaagaatctagatattcaccaattcgcaacaataagtaaaaaggcgacattaggttgagttggtaactgacatatcatataaccaagaatccagcatattatcagagatagcagaaaacttaaagtagattgccggccattgagttcaaatactccctagttagaaggaggaagacatctaaagaaatattaaatagaatgaagagaaaggaagtagtctccataacacatggaaaaacacatggtgccatacctgcaaaggcagcaatcttagagagaaataaaagattttttctgtcagtcaattttagtttcattttcatatactcctgttctccttcctcttcagcaactgaagtagattgcatgttttgtgagagagccaatgcatgaagtgtttctgaagcagaggaaaattgatgaaggaacaaatcatgaagccaaagaagatcgggatgctcccttaggaaaatggatagctcttctggaaattcttcccctagccttaaaagttgagaaaattgtcttctttcatggagtttcttaaagacatagtaactaaatcccccattaggtcccaggctttcatgctgcacacaaacaattgagacataagcaagaatacatttaaaaaaaaaaatggcaacacatagtacatatagaatccttgtgattaaataataccaaatagaaatcataaattatcattttccgataaccaattttgtgtgaaaggccgaggttttattcaacattgggaggtgtcagcgatgtaattgtaaataacttatttatactattactagtactaactcatttcaggtgccgtgtccaaaataagacacttttatgggtatgtcttgtgctctgaaagttcataaaaataattggtgttgcattgtgcttgtgtgatggtgaagaacatggtcaaaaaaaattcgtatacctggttaacatttgtttgcacaatctttctttggaagctctttccaataatatataaaggcttaaattgaaagaaagaatatgtggagctatacaaatttggtagtactgtgaggtttgttgttggttcttaattaatagatctttattcatttaaggggcattttgtgtcctagctctagctctaggtccggatgtaactgctactattgcttccttatggacttaagttttaggagtgcaattattttttctcagcagacttctactcaatcctaaagccttatcagtaacggaatatttgggttgataagctaagaaaatcatcattgcaatttgcaaatgcctagaaaaaagggaataaaagaaacatcagtgcacaatgaagaataaaatcatagtcataccataatatttctcagtaattccgagtcattcacatcacaacaaattgtccacataactttgtagcatccatgtcgtttagcaattgataacagatgtgaagtaaccttcattatgtcctcttcattctgctctccagctccttcaatcaaatcctgcacaaaagaccaattgaacaatgtatatctatcccacaccaggattgcaaggatacggtaagcaagatagaataataaccttgtgagtatcttcaaattctttaactttttggtagagagattcaagaaggctatctcgcctctcccaatattcatttaacagacctttgtgttcttctccgcactcatttttagctgtaacagcaccagaatatgcctcaagtagaacttcagctagggcttctaaatgattatacagatctaattttgctgttttatcaagtccagatatttcatttaacaagtgaagcaggacagaagcaacactccaaataccagtccgtacaacaggttgacaataccaaggtgttaaaccttcaggtggtggataccataatcggttctcattcttatagttgaagcatgtcctaattatggtaacacatgcagtagagagttcacatgccctctggatctggattcctaacagatgctctggtcttataacatattctaactctgcatctaagcagtaaaagagatcttcaagatctgaaaccttactgtagaacacttcagcattatctctatccatcaaaaggacagtattccgacgagctctctcaccaactaattgtataatgtcccaaagggcacctgacatctgaatattcaaactagaatttgaggagtcaacattagttgatcgattttggctaatcagattttgcagttccctcagctgaatcattgcagataacttttcaccatgctccaaaataatttgtaaggcatgtcctgggaattgaaaaaaacatcatttagtaatggaatgtccatttgctgttccctaagtgttgttttaacttgcatttttacctgaaactataattatttatttcacaaccttaatctatttaatcaattaaaaaaattggctgggaaaacatgaccattaacaaaatcataaatcaaacatgccttcacttataatcccaccctaacaagtcaaatgacatcaagaattaagaatccatgtgctttaggatttcattcactccttccttacctaattaagcttacattatttttaaaactctatgtgaggctatggggaagaaataagataattaagcctcaattcatttagttgcagaataaacctccttcctttgattttttcatacatgctgaggcaaaggagcagatggatgataattgagattatattcatattcattttacccaatttataaaagtcaataagctatcagtgaaaaaccactctccatttttgcttgtgatatactttgtatgagatcatcctaaaaagtatgattatatctgattcattttattttataaaaacaggctggtagataaataaagctcatacagacatcacatacccaaataatgtaaaaactaatgaccaagttaaacataatcaaacaagtgagttgcatatggaagtattgtaaaagaaattgtttgaagatcaaatcaaaacaaataatcttttggtgaatagactaaaaatttcatactctgcttagaacatagctcctcgtggcatttggataaggcaagaaagtgaaggaacttttgatgtttctgctgcttttctaagagttgggttgaaacaacagccatggccaaaatctctgctcctctggttgttgtccaatgtttagctaaggtgtctatgattgatttgctcatccgaacaaaaacattggtttccccatccctttcaaatgaaccagatgtttcaagcttttcaagagacctatcaatttggccagatgataaaaaatcattgaatagattattcaataaagcttctgattcttcatctagagcagttcgacgtgcaatcccactcaaaaccgtcctctgtttgtctccagcactccatgcttcagagctagcccttctaggagcaaaattacctgcaaatgtaagatttcttatatctttttgtgcagatctttcatttgaactgcctttacgagataagcttctctcaggtggttccactcctccaagtataacagctttctctggtattgcccatattcctgctttctctgttaatacaacccatgcaccttcttcataatcatctgcagaaggaaggatagaagcatctagcactttcccagcatcataaggtaaatcaaactgataaagttgtgtagagtttctataataatgggagacagttgctgttccatccccagatattatgactgcagatcctgaaggcttgccccctatccgaagcctcatggaaaacaagaagtcttcgtcttcaactctagcttttggcattatcacctcaataggggcttttttctccaaaaccctgtcatttgtagtctctaaacccaaccctgatttatattgcatggtcaagagagagtactgcatgtagcttgaactgctaatccggtcattgcaaaaggttgcaacaagaatggtaatgactttaccatgatcatctacttgcatatcaagaggccagattctcttttgaccagctagatccttcttaatgccaacctcagcatctgttccaacaattgcctgagaccaaagcctagaaataggtatatcagaaccaaactctactctgaaacactgtatctcatggtctgacaataccaagaattgtgaatttgattcctgaatagaatgatgtggaaaacaccacgtcagagacctagggtacccaatattgctcacaatttgacctgattcaccctgttggagccggaaattttgatatactttccttctatgaatgccagtaggagtgcattgaaactgccaaagttcaccactcgagctacacacaagggcaacacatacaaacttacaactgggatcagcagaagcaatcatagagttaaatgtgtgcaatccactcaaactacttcccagcttactttgtcgccgctgcctgtcgaaggatgctttcccatcaggagtcataacagcctccagctcatcggaagacacaagactagtgaccggagcgtgtgactgagaatagatgtccggccagtatataacagcccgagtccgacaattgcacaaaaccacagcagcagagttgcactgtttagcaactttattcgttcccacaggcatggcgtcacaattaacaacacgaagcaaccaactaccagcatcatttctgccaacatcagcatcattcaaaggaatctcgaggacaacacatttgatggagttagcaggggacaaataactccataggtagaccctgttcccacaaataatccaagcaagggatgtgctcttgtcaatcccgccacacgcgtgatcttcagctgcattgcgttacatcataatctcaaacacatcaagcttaatttacttcaaatgtgaagggattaacacacgtgctaactaacacaattgagagacaaatcaaacagttctcaccaggaattcgcttgtgtagcaaaatgttctgctcatcacgaaccacttgcggaaactcgccgacgaaaacaggtttggtaggatctgtatcgtcgccttttccacttctgttgatctgaggaaccctacgcaatgaaaacggataacagttagaagcagaaagcgaatcgatgcagattttggtgaagaagtgaaatgaatgaatgaatacctggcaagaacagataagcgaggaacccagggagcgggagtgccggtggtcgggcgattgggaacggcgttatcgtggaaagaggttcgagcaggagtgaccggagaatctaccaccgtggaatcgcgaccttgctctctgcgagagcgaacattgctcttcttcgttccgcaagaaaacatgatgatgatgatgatcactcagtaccggcagattttagggtttatggggttttcgccatttgaatcacgagagggaaaatgaagaaaatgaaggaaccaaatatcgggttttactttttaagtgtaataaaattttcactcataacgtcttcatttttttgctaagggggaattctttctctttaggcacttgtgttcatgtaaatttgaaattataaagatgctaaaatatctcttagaataaaattattcaaagacaataaaaagacaggttagatgaaaaataatttataaaatatatgattatcttatcagtttcatatttaaaataagtataagcacacattatagtgttgatatcattcatacggaaaatatattctctagttaaaaggttatatatgacttaattttaaccatataagcaaaaattacttgttaatttgtatgcataaaacttacattttctgtgggtgttgcattgcatatatgaatataaattacactcataaaaatatgaatataaatgacggttctaactcactcattcttgtaaactcttgattattagttaaagtttatttaaaaaattataaaattatgagtgaaacttagtaaataaaaaaaaatctacaaaaatttataaattatagcaaatttcaactaataaaaaaaagtgttgaagaagcgcattattactcattagcatttgtcatgactagaactacaattgtcgactttaaaaaaaaaataaaaaaactacaattgttgaaaggggtcctaattttgtgtatttgctactgtggtattcattatcttaaaagcaattactattaaaaaattattatatgtaatttatttatttttgaatagccatgaccgtttttcataaaagtctctgcattcaatgcgaaaccgtttgttgtaacccaaagaactaacaaatgcgaagggatgaaataaataaaggaagccaatttcgtctgacgctgggttacggttcaagcagccatgtataagcgaggataatgaagcgtaagagcatgaggcagtgcctgccgtagtggccagtcactactcactaatgaaaggtaaatactttgataatcttgaattttttttatttttttttacgttttagtttttctttttttttttttttttttgtccttaaaatatctaaaactttaaacagtaaaaaatagttctttgaacaataaactattatttaaaataatttaaaataggacgaaaaaaattgcacacaaaaaatgaaaaaaaaaaaaaacactaaattataaaaaaaaaaaaaaatgtatttatgcagtacatataataagctcgtcatttgatatcatagctcaaaatttcattttcaagatgacaaatttatgaacaaatgattagaagaataaagataacgggtattggaacttgaagagaaacggcatatatcgtattttcgttcacatataagagaatacataattacacagcaccggaaattagtgcacaaggaccttctactgcataacagttcagttctccagaggagaagaaacaaccaggttttggaatcaaaagcaaaataaaataaaataaaataaaaaaaggggggctagaaaaagttctttcctatcttttgttttctaggcaaaaagaaatttgctatacgtacactggtacacatgcagaggtttaacttattgtattatcatggttccagcttcaaggaaacaactcttgattgtctgttggattttgcaacctttaagaacactgtagataggcaagccggtgcccaccatggccgccgcaccttctgctcccctttcagacaagccactacagacatcaatatagcattcacaagttaggagtattaacagataaagccatttttttcaactttaccgggggtaaacacccccctccctcccccccttcttttttatgttgttgtcacaagaaatatcatcttgcaagaaaagtcacaacacaacaaacagaagcagcatatgcatattttgatgtctccttatatataaacatatcacatgtttaggaatggacgtcttgacaatcaagttctggatgactccagcctatataataatatagggtttgattatgtttttggtccttttaaaaattcacaaatttcacatttgattctcatttttattatttttccaaatgagtcctccatagggcatgtttgttaccaaatgatttctttgttgagtttgatttatatatttattgtccatgtaaaacgattttacatacgcatacaatatgaatttatcctaacaatgcatattaatttaactcttttttatttttcccatttgaaccttcttaaatactatattacaaaattttcatctggtccctctaaatgagagaccaaatagaaaattctttacatttagagaaactcctgatatctccaggaatcaaataagaaaggaaaactgcacaacctagtgatattttttcatcaggtaaagaaaaatgtcttatgagaacattaatttgaaaagaaaaaaaaaatgggaaatcaaattggaaaatcacaaaatttttagtgtctaaaaacatatatataaggaagcgatttttagaaaatgtaattcacaaattgtcttgatactcacaatatagaaaaatatgtgctatgatgagaccctttaatggttgtctgtaatgaaatgacagcagtaccaacaacttataggcaagttatctcactctaatacagtaatactaaacgtctactctaatctttcttctagtacattcatgtttccttatagattgttcaaatagtacgaaactgattgtgacaacatcaatgatcatgccttacctaaccatggaaagagcacaaaacagataggtaaagatgaaaatttcaaatgagtttattgacaagtgtttttctgtttactgtttaaagggggaaggatagagagagagagagagacctttaatccgtcttaattccttgcacaatgtgatgaagtctccccacttcatgtggcaacgtcttataaaacgtaggatctgttcagtcgtaaacatggacatgccttccaggtattctccattaacaccattttctttaaaaatttggctgtaactaccaagatttatagtctccagccacaatccaacatcctgataaaacatgcaagataagcaagaatgcaactgttagtttaaattatcagttacattttgattctgccatggagatgcactatattttttttatttttttttttatcagcaaaaatatgtatatatatatatatatatatatatataaaggataaaacattacaagaaggaagtagaaaacaatccaggcataaagaaaccagacctatggtagcttaatacatgagtagggcatgaattaaactaccaaaagctggctggattgtgtacaacccttccctagatggagacgcactatatgatatgtctgtgtaacagcactcacatgttatatacaccaagaagaagaagcaaatccaaaagggtttatacaacaagcttagatccttgtcaacataggtctaatgtaatttgcacaattcatcatacagaaacagcagcataaatgaattaaaagaaaatatgtggaagcattccagagcttactacgttatatcagtaattaataacagtgcatcaattatactgtagagtctagacctgtataacagtgctgaataagcattattgaacactcaatacataagtagaaacatacacaatacatgagtagaatcataccgcaatcttgtgaccttgacacacacatcaaaggagaataacaagatgatacctctttatctgtaatagtttacacttcagatacatgaccttaataacctacttaacagagtaactgacaacaaggataaatcataagctggccacatcactgacagaggaacagggactaagggcataatcaagacaaataatatattggcaatctagtttcagatgctatttttccaaaacatagttgcaacaacagtgtttgaaaatccaatgatcacagaaagatgcatatagctttgcagtggaaactcatcaaacgaagatttacacttatgtttgtgctgcacaaaggagtaagtaagcattcagtgtaatctattattttctttgagagaataatgtaaaagccctcactttaaaatgatcatagaaactgtgagtgtcaaactgaagaattgaacaaagttatctggcaagaattggaaacttaatttaaaaaccagataacttgtgaaaacaacagggaggagatgagattcacaattaaatgaaataattcacgcacaagtttgattagccaattacttccaagttgagaaggacttcaacatcatccaccaaatttcccacttgattagacaatactatgttcaactttccaacatataaaaacaggtttaatctcagtctttacttgtgttatcggagaagcaaacgaatatcacaaaacagactatcgtggacaaagttcaagttatgtacccaacaaatttagttaaactaactgttgcaaaaaacctaattacatgttaaaagtacaaatcacgtaaaaagggatcacaactcacaaggcgtggttttttattatgagaaaatgtaaataaaaattaaaaaataaatacatcaattgacaaagggaatgaaatgattaacctcaacagtccagatgaagaaatcaagaggctccggtgactgtcctttgttcatttcccaaatcaaacttcctcaaatacacctgaacagagaccaaacaaataagtaaaatcccccaccaaaaaaaaaacagtttttctcgaaaaaatccgtaagaaacttttcccagttaagtaaacgataaagggtcgatctgacaaggagaagattggacaacccgctaaaatggaagccccaattacaagatctcaaggactaatttattgaattaaaggagaaataacaaatcaaaaaaatagtataaactaaatatgcttaccactttgcgacagtaaaaattgggttaagattaaaaaaagggaaaaagaaaaagatattctacgtttgatgtgaggaagaagacatggagaggagagagaaagtaagtgatgtgagaagagatgttaagacaggaaacaagagagggagaaggcttttttttcaactcagaattgcatgcttcgtgttaacgcatctgccacgcaccacgcgactccgttgcatcacaagccacgcgccagccttgccacttgctactcgaaaataaataataagtacattatttcctctaaattttgtgtaacattattgattaataatgtaattttgtggctgaatcatgactttgatgtttaactacctaaataaattttgcaaataagtctctagacatagttaagtgtcattaaacaaatgcagtaagacaatactagtacttctaaacaatatatattattttttctggttataagaaatatagatttattttcaaatgtattgattgttaattaattaattacttgtagtattttagcttacatattaattaaaatttataatttataataaataaatatttttttagcgtataaatttattataattaaaatatataatatattaattttttaacatataaatgatattttaaatttatgataaataattttttctgtgtatattattattttaattattaataaattcttttagtaaaatatttaaattcaagttagaactataaatattaaagatgatagattgaatgagataataagttaaattaaaccgttcaattaatatcaaaagtataagatggtatataaatgcatttttaggagcatttctgaattctgggcactgaatatacatatttgaaattgatttctcagttttaaagtgttaaactattcaattgatattaaaattttaaaacatagaaagatatatcatatgcattttaagatagtaaagttcatcatttcacaagaggagggtattaaaatggaagtgaatatgaggaagagatagagagacaaactagtcttaaatctttataataacaagggacttgatatatttttgtaactttaacttattacaaaatatattaatgagatattcatgtatggactttttatgtaattatttttgattaaaaattatttttaaattacatataatgtcattaaatataattactatttaaatcatttaattctatgagtatttgtgaaatgaaattaaaatttatgacattattaattaaattaactaacttaactattttctttacaggaggacgatagccgtgtgcatgggttgggtgcatgggttgtattattatcaagattgaaaattttcattgcgaagtgctaagcaggaaagtgtttctgtgagaattgaggtgttgttgatgagtctcataatgtggtttcgacgcatgaagaaatgttttttgtgcaaaattaaagataaataaaatgacaacaaatacatgtcacatatgcctttcttaattaaaaagataaagatcaaatgtcgatgattctttggtgaatgtttagctaaccaaagatattgtccatataatcgattttgcatgctgccccaaaattcaaggagatctttttttttaaaaaaaaatattatgtttaaaatctttgcaattttatttagatttaaatatttaattaatttgttttaacttattttaagaattttcttatttttaaagattacgatgatgataatatttaaattttatattgttatttaactttgtatattaaaaataaaaatcttaccatcttgtttatctaagatctcttaagtgtatggataattgttgttgtgtgtggaaaagtttttttaacattgtacaaattgattaagacatagaagacatcacatgtatctactatgagtttctaagtgaaaatccaaaccaacactataactgccattgaaaagcagtatatatgaaataggcttaaatatattttttatacctgaaaatagttttttttaattactacctaaaattcatttttggtcatatatgtacctggaatttttttatctttcaatggaatatatgtctttaatctcgttttgttaaatgataacataaaagataaagtgtcatttcatgaagctattacacttaacacatagccaaattgaaaccatgtcattatttattatttaatttattttaaaaattcaattaaaacaaatgggacttctccttctccaacggaaaacaacccagtgccatccaacctcgcgccaccactgcattgccatgaagatgttgcaagggatgcctcattccaatcacaacccttttgacccctccctagtttggtttcacaaagggtaggatcatttatcaactacaaaacacaaactaaagccccaacaacaaacattgtattcgtgagaaacaacaacaacatcataattgtaacacacacatgtgggtttggtgacaaacagaagaagaacttggagtagagcagagatggtgttgtggttgtcatggcaatcgttgggctccatgttgaggtaccagtggtgccgcggcagagttcgtcgacaatgttgacggcctagatctctgcgacgactgtgccctgggcatagaggtagccctcgccgacgactttgctagagagggagacgatgatgcaaccgaagttggggtgaggggaggtgaaggaagaaggagaagaaggataattgaattttttaaataataataaatgatatggcactaatatgttagtgattatgtttgatgacgtgacattttatctgccacatcatcacttaacataatgagactaacatctagtattacattgaaacataaaaaaaaaaattaaatacatagattatcaaaaataaattttaaatagtaaattgaaaacaatctatttttcaggtatgataacatatttaagcctataaaatatcaatttaaaccggctagctttcttcttggccaacaactaaatagctttacttgtgcaaatagcccaagagacaatcaatatttttagaagcaccgcaaataacaaaccaaaatatatttgaaatgaggagaaatagaaaagaaaaagaatccattagcgatatcatccgcggaattttatattggttgaacctccatatatcgtaccttataaagcaaagtgtgtatagtatttaccaccaaaggaatcaggaaatgattcgaaggaactcataataggttgttgcagttgaagtaatgatagtttgagacaaatgcggacaatgaaatgttttatagcatgtcattgagtcgcttggaaaggcttgctagttgtataaatataagagtttcaattttggaaactcaacttccttttctatttcatcaccttgttagttttcaaaaaatttcttcaacttggaggctccattaataatcgtaagttttatatgcagagtgagagatcaaaggttacaaattgtggcatggttatatgattagtgttggtgctagttttgggaatcatgaccgtggagaaagaagatttgacaatttctaattaccaatatcctcttcggtcacttaacactttgtttgtttcctatgaaagtaaaaggtgtgaatgtgaaaaataataaaagacaaatcacatatttgttttattaaagatgaaagtaaatattttaaaaaaaaaaagactcatgagccccacatacaagaaaatgcatctcaaaatgagatgaaaaacacactaaaaagtcattattattattttactttgacaaataaccctttcaagggccctcgtacatatggtgggccaacgagtgattgattttggatttgacatacagtcgattatgccaaatagatatcgattatatgcctttaattaaaagttttatttttttatttttttatttttacactttcatttattttcttacctttctatcaaacacaatgttaattttgggaatttacttatctacatatactctgacctggttttaaattggaagccacacaattgcataaatatacacataatcccaaaaatgacatacgacaacgtggactcatgtattaattccctgttttgttagatgaaaatttgcctcatatttattttatgttcgcacgtggacatgttaagcaaatatcaacgaattttaccaaatataaatttgttaaaatatatccttttgaaagttattttttttaaaaacatatattcatacttatggtgtagtgtagtaacactccatttgaaaaacaaaacacataggaatcaagctgctaatatcatgacccaagcccaataagaaaatggcgatgtttcaacagtggcgtaggcccaagcccagctgagccggcccactattgaagtctgaactcaagtcctaccatgttggttcagttcagttcaccctaaatttcttccactatcatcttctctcagtcttcattgtttgttgggggaaattcgattcggtttcgcaggcattgcctcgtttcgaaatccatgctatttctgtttcgttccttagaaaatgtgttgattgattcatagaaatgtgttttgcagagtagaatgtttgggacggcgattcgatgtttggcgaagaaaccgaagccgaagatgggacccgtgatcctgaaaacgccgccggagcagaggcagacaatcacaagaaccctcttcgatataattaaggagcatggtcccatcactgttgctaacacctgggaacgtgtccaggtactagtaccttcttagcttctctctcacattctcttcaatagtgctgaaaatagatataaacttgatcgggttttaggaagttggattgaaagatttgacaagcaagaatcacatgaaaatagtgctgaaatggatgagagagaggcagaaggttcggctcgtttgcaaccacgttggagcacacaaacagtttctctacaccacttggtttaccaagccggttacccctcccaagaatccctcttgaaagttgaaacttaatcatcagttggttgctgctgttttgtaccatgtcttgtcaagagtaataatttcatcttagaaccgttattcaatagagagaatctaaatgttttgccttattttccattgtttctgtctctgtgttcttcactcacaactcacatacctattaatgtgtgtttggatagcttctaaaattatcgtagattatggtaaggttgatcaatcttgattttgaccaaattttgcatgtttagattgtagaggaactttttgcaaccacgttgaagcacacaaacagtttctctacaccacttggtttaccaagccggctacccctcccaagaaccccctcttgaaacttactcatcagtttgttgcgctgttttgtacaatgccaagagtaataacttcattttagaaccattaatattaatagagaatctaaaaatcgggctttattttccgttgttttttcttcttcactctgttatttctgtctctgatggattgaatgatagtagaactttatgattctgaatttttccggagttatgaattttaagaaggctaaatcatcataaaaataaaagaactaataccccataaaaatagatttattaacggttaaaacatggagatcatatctattttcatgtataaatctcttgcaatttgatggttaaacttaataaagtgaaagaaggtgtcagctagtttatgaaaggatccagaatttaatgtaacacttctcattttaaagcattagtttgtttgggttggtgtgtgtttctggatgggtgaatatccttttttaggggtaaggtatgtgccttggtgcatgtttcgacggattgaaattacgagtttcatagatcatcatctaaaaaataaacttcctagcatcctcgatagtatatgatacagtataatatgcttaccagaattagaggtttgcatcatgtcctcgatagtagtcgttgaagttagtgataactttgaacaattgtgcacaagaaaattaatcacgttctgaaactatcccttaacagaaattaacgaggtttggctgttgtgttgagactacatgtttcagttttggaagcaaaacctctactcatacctgctacaccttcaaacacttgcatgcactggacgagaattttgagattgagagtgtgacaagatggagtttaaactgtttgggatttagaatttgagatattttcattttctttatcgtccttaatgatttactccagttcctctcaatgttctaccactaggacctttaacagaggtatcattctcaagacagagatgcggagaatgatagcctttagttttggacaattgcaaatgtgtagtttatgaagatgttgaacatgaaggctcaaaaaatgtttggaactcgtccatatataccttagctctggtaaattgaataaccttaatagtgaggacttctaagttctaaccgttgattggaaatccctcaagatagaaaatttctttgattttagaggtgttctcaataataacagatactaaattttgcttaatagtcataatcgttgccattgaatccagtaaaagcatattaattatgaaatctgatacaaatattaaacatttcacattttaagagaagtgactaaatagaattattgtcatgcttataaaacagatagagtcaacgttttagaactaatgatccgaatgggtaaattattgatagacagagtagacaactcagcatcgtttataacaagcagttgtaaggatgagcatgttccaaaataattttctgagcaaatgccgatcatatttggcaactttttcctaaacaggaaactcaatttaggacttgttttgacgttccttatccaatggtgtgttatagacttatagctgattgcaattttctatcttcagctcttttgattgtgaggtaggcctcctaagagcgctggaaaatagcatttggcttaaaatattatcttaaagctggaaaaaacaattgggttcaaagataattaattcaacaaaatatatatgtttattggtacatcaaagtacagttaattcaagaactgacctggtttaatgtttcttaaagtaaatgaaagaattgaactgttttcagcaaatgtataaaagataaagggacaaaatatttatctaaccataatttgcacaagtccaaaaacgataattatttccacagaaaatgctacataaacataaattgctcgcactacacgtcccaaaaagaattctacactcagaaactgacagtctcattcttagaagaattgcaaataacaccaaaatgtatatctaaggagaaacagaaaatccactcaaccaaagggtagggctagaacttccaaatcacaaaaagtcgaaacatttttgtttgggcatcaacaaaatcatcaagactctttaagttcatcttgtatgttgcgtagttcctgagccaaatgatcatgcatcttaagaagctcaccaattcgtgcttgtgcatggtccagccaggatcccttgccacaacacgttgacgcatttcatcaacatcatgacctctcaaatccaagttgaacagcttcattgcatagtttatggaactcgttttctctctgaggagtaacactaacggcactttcatttcgaaggaacaacaacatatctgccaaagtttccaacatccatgcgtgaaaatgctcactgaacttcacacaagcattccaagttgaggatatgctgctattgcctcgccagcagagcaatttgtgcatcatccagatcaacaaagtgtttatgtgctcccaatcttgtacaagtatttgcagaagctgataaaagtttaaggagtaggtcacatataacaaagcaataaaaagctattataagaaacaattcctattccctttgttttatccaataagtttgatccttcttggatttggatgtttttacaaagtgttattcctatgttgccttcattcagcttatcatcgttcaacaacctgaaaatcttgtgcaagtatgtcgctgccgctagactcagctgtgagttgccacaccactgcccaagctaatgctttctacaccagctgacaaagtgtttgctgttgctccctctgatggaggccccttctgaatgctttcttttcctatttccttaatattttgtgcatcacaaatgaataaaaatgtttgagccgctttaaaaaggtcagttgtttaataacgtacatcaggtgctggcatgacagtaatttgtgcaattttagtggttaccattgtttctccaagtgcctgtcggtctggaaaacctgcttcattgcttgattcttcatccaccaacttttatttgcaatactgaacaagcatgacaggaattagtcttactattaggaaatctattttcaagcttggtaattattaaactcgtatgcaaatgtatattatgtagagaagttgtcatataagttagagacgagcttctcacctctaaaatagaagttggtattgctagttttacagatgttgggacatttccaataatggttctctctatttcatcaacactctttacaatgccaaaagttatgctgatcagcatgctaactttcattgtggctattttaattacttccttcttctccatatttagtttactaatatatagttttccgaaagattaaaagaaaaaacatatacctctgtcatgtttggggaagaaatgggtgacaatttttgctccaacgtttgtggtaaaataataaatagaagtgaagtcttaccagattctgccagtaatgacattcttccgtgcatttttcccttctccaagcatccaaatcaaagaaattcattccataagtcgaaatcaattatacaagttggcttttgtgaatggaatgcaagaggtttggcttaaatgtactcttgccacattgcagttgtgtaattttgattctcgagtttcaattatacaagttggaaaaacaattgggttgaaagagaattaatttaacaaaatatatatgtttgttttgcacaagttaattcacgaactgaccccggtttaatgtttcttgaagaaaaagaaagaattgaactgtttctagcagacgtttaaaagataaacggatatatatatatttgcaaaagtcgaaaacaataataatatccatttgccacataataaaatgctgcataacaaacttaaattgctagcattacacgtcccaaagaacacagtagactcagaaactgatagtctcattcttagaagaattgcaaaatgtatttgtatgaagaaacagaaaatccccacaagtgggacacaaccaacgcgtagggctagagcttctaaatcataaaaagtcgaaacattttgcctgggcatcaacaaagtcattaagaatcttaagttcattctgtatgtcgcgtagttcctgagttaaatgattacgtctcttaagaagcttccggattcctgctcgtgcattgtccagctcaggatccctcgccacaacacgttgacgcatttcatcaacccatgacctctcaaatccaagttgaacagctacattgcataatctatcgaactcattttttctctgaggagtaatactaacggcagtttcattccggaggaacaacaaaatttctgccaaagattttaacatcaaagcttgaaatcgatgactacacatctcacaagtattccaaagatgaggatatgcttttattgcctcctccagcagagcaacttgtgaatcatccagatcaacaaagtgcttacatgctcccaatcttgtacggatatctgcagaagttgctaaaagtttaaggagtgggtgacacataaatataggatggacaagagacaataagagagcaataacctggagaaacctcaatgttgttattagaaacaatgcctattccctcttgtttatccatcaggttcaacccttcttggatttggatttcttgacatggcattatttcttggatttggaaatcttctgcaagtatgtcctttctactagagtcggtgagagtcataacaccactacccaagctaatgctacctacaccagttgacaacgtttttaccgtagctccctctaacggatgcccctcttgaatgctttcttttcctatttcctcaatattctgggcattacaaatgaaaatgaaaaaaaacgtttgagtggctttaaagttatagctatgaaaaggaagatgttttataatgtacatcatcatcatgcgctagtattactaatttgagcgattttagtggttaccattgattctccaagtgcatgttggtctggaaagcctgcttcattgcttgattctttatccaggaacttttatttgatatattgaacaagcaacacaagaattagtcttactattatattagaaaatatgttttcaaggctagtattattaaacttacatgcaaatatattttatgttgacgagttgtcatacaagtcagagatgggcttctcacctctaaaacagaagttggtattgctagtttcgctgatgttggaacttttccaataatggttgtctctatttcatcaatactctttacaatgccaaaagctatgttgattagtaagttaactttcattgtggctattttaattccttcctttctctccatatttagtttactaatatatagtttttaaaaagattaaaagaaaaaacatatacctctatcatgtttggagaagaaatgggtgacaatttttgctcgagtgtttgtaagtttgatgtctttttgttttctctctctgattcagggcactcgcctgtttcgaacacagttgctctgctttcaaattgcttatgttcacgtacagtttcagctatgcttccaagaacaaattgattgttatcattgacttgtggagtaggtggtttacttttggatgttgatggatcttctaggttcatttgaaatggagaagtgttttctggcacggaattctgctcatgctgaaaataataaatgagaaacaagttggactatgttcaacgattgattccatacaaaaatatgcacgtgcatatgatttatgctgagaagtaactaatgaccctgactgcgagctaattgattctaaatgagttgacctagtaatgtcattgcattttctaatgcaattccttctctgacacctctcttaatattctgcagaaattcaagaaatatgcaattttgtagcatactttcattcttcttgtaaaatgaaatgacaataagcatgtcagcctcaagccatttgaaagggaacaagcattggtccttgtttttgaattagaggacacaatcaatgacaattttctctgattgataacctttttgaataatttgttcattgggtttctgtagtctatattaaccatttcttaaatattcagaagaatgtgcatatttagttggtataacattatttacctgaggaattcctatggtactttcagtttttccaagtggcctttgttggtctgtaaaatatgatcgactcgttgattgcccatccaccaactcctacatgaagtgatgaattaaatgcttgagtcttaagctattcacttcttccaatatttataatagcttatggtatactcacctgtgaatgtgtttcacgttgacaaatatccaagggacttggggttggccttttattcagctctgaatttgttgaagttgcagtagcctgtacctctgaaccaggaatgttcccaatgaaatcgttctctgatttttcattaatctgatcaatgacaaaatatacaaaaagaataactcaacaagtaattttttttaataaatataatgaaattataaaaaacgaggatctttttcaattaattaagtcataacaaatgtagacaagatataatgaagcaatgacacgtattattatactgctgtcaaagtttcgtgaagtaggtgatgagttatccgatttgatgccattatcattgtgattgtatttaggtaggttaacttgcacagattggctggttctaacctgtgatgaaggcaactcactggtgccgctacttgtagaaacttcatctgattcaatcatattgcaaaacaagtggacaaagtccaacggtgaaagtccaatgtttttgaaatctgtaacaaaacattataaattaaaggacttcatttgacaatgaaacacagtaacaaaaatgcaatgcaacttcaactttccatggtagatcattatattgtcacaagtgtgtttgtaaggcattctggcagctaataagctacgctgactaacttataagttattctgacaagcttgagtggtaagcaagcttactttgagcatccacaatgggcaaaaaaattaaaataatgccttttaaataaaaaattaccaaaatatggccatttgaaacatatttccgaatctactgctgccaaacacgtctgggtaagacgtgttaaatcacgtcgagcttggacgtgttcaaacacgtcgtgggatggcgcgattaagcacacaaacacgtcctgtgtgggcgtgactttgcacaagacacgtcctgtatggacgtgattaaacacgtcatgcagggacgtgatttacataacaggaatccccattctctctgcatccccattctttcttcagtttttccaatccccaatttgcataaaagcttgctttagttttatagcttgtttgatcgtgtaatttcaaattattttgttgcaattttcataaattctttactatatgacaaaatatatgaaccaaaagtgaaatgtaaaacaaaatgattaataagatgaaaagaataaaaagatataataggtcaaattaattttataaaatcaaagtttaaaaacaattaccaggttatgtatgtatcttttatatcatttttttgtacgagggtatgtatgtatcttttgccaaaaaaaatattcagtttaagtaagattaatatgagtaatatattttttctttaatatttaacgtaattatatgtttaaaatttaaatttaaagcaacttattatattaaaatattattttagtgtaattagaaggtatctaaaatttctatttaacgcctaattattttccttttttatattcattttaaagtaaatatcttttgtcataatttcatgctgtaaaaaaataaactttagatgttgattaaaaaatcttatcatccgttagaaagatatgaaagtgaaagaaaaaaaataaagagcaaagaaaacactaattatgatgtattttttgtttgattgaaataaaaatataaataatggttgacttctaaaaaaatctcttacttgatttaatagacgaaaaataaaattatagaggaaaaaagtttgaaattttgacaaaatctcttgcaaagaggaaaaaatctcttactttatttttcgtctattaaatcaagtaagagatttttttagaagtcaaccattatttatatttttcttttactttctctccaatcaaacaaaaaatacatcataattagtgttttctttgctctttattttttttctttcactttgatatctttctaacggatgataagattttttaatcaacatctaaagtttatttttttacagcatgaaattatgacaaaagatatttactttaaaatgaatataaaaaaggaaaataattaggcgttaaatagaaattttagataccttctaattacactaaaataatattttaatataataagttgctttaaatttaaattttaaacatttaattacgttaaatattaaagaaaaaatattactcatattaatcttacttaaactgaatattttttttggcaaaagatacatacataccctcgtacaaaaaaatgatataaaagatacatacataacctggtaattttttttaaactttgattttataaaattaatttgacctattatatctttttatttttttcatcttattaatcattttgttttacatttcactttttggttcatatattttgtcatatagtaaagaatttatgaaaattgcaacaaaataatttgaaattacacgatcaaacaagctataaaactaaagtaagcttttatgcaaattggggattggaaaaactgaagaaagaatggggatgcagagagaatggggattccttttatgtaaatcacgtctctgcatgacgtgtttaatcacgtccatgcaggacgtgtcttgtgcaaagtcacgcccacacaggacgtgtttgtgtgcttaatcgcgccatcccacgacgtgtttgaacacgtccaagctggacgtgattcaacacgtcttacccagacgtgtttggcagcagtagattcggaaatatgtttcaaatgaccatattttggtaattttttatttaaaaggcattattttaatttttttgcctccacaatgggagttgtttaataggttacttataaaaaaatattattttgatatgtcacatatttgattttgtgttgtttatataagtaactattactcataagttgcttaaatttgtattaaatacaggagagagaaagagaatatttgagttaaacaacatgtatgttaattaagtttattaatttttttaataataactaccttaaaagtcatagtagtaatgagttttattggttgataacataattttttttcactgattgtgcctagttattaaacttatatatatagcttatgagctaatcttaccaaacaaatccatcagtcaaggaatgttccactatgcataataaggtgaagagtattttttttccaatttagatgacttctgtatgatggagagagtactttaaggaggtggagtaaggtgtggtttgcactaatttgggtaatttggttgggccgaaattcttgtacattcctagaagacacaaaagaggtggaggaaaaggtagaaatcataaaatattattcttgggaatggagtaggtttatgaaagtgtttaactattctttgttcagatggattgtaaatcccaaggcttgccttggtgtcctttagttgagacggggatcaatacaattgactactggagagagggtaaggaggtagaaaacagtggtggaagttagaaataaggtatgtggagaaggtgatacaaggtggttaacaggaataagatagcgaacttttttagtattgaagtgatacagtgcagggtagaatgaaagtggtacgcgtgactgtttaagacagacaaggccaaaaatggtgtgggtataatgtttgctgcagctcaatgcatgagatcataaggcaccaatattgtacgaggatgtttgcaatggacatacacgatatgaacatctcatgattatcacacatatactattctggtctcaaatataaaaataaaataaaattattcacactaatttaaaaaaagttaattaattatatttaattacatcaatcttaattaattaatatttttaacttattcttaattgaaactaaaacctcaattaaataaaagatattttaaaaataatatcattaaatgaaataaaattaattaaatttttttatatttaaaaccaagaaaaatatgtattttttcttatatttatgataaaagaaatacattatatcctattgaagcaaaccgttgttcactttgtttgggtggcaagctgttttttgggacttgcgtagaatacatggtgggctgtgggcacgtggttagaacttagaaagaagatacgtaacgggtgacgaatgtatgagagattaaatcaagagaaaaatgatatgtttagatgtaagtttttttagaagtatttttaaaataaaaaattaaaaaaataaaatgaatttctccataaatttaaatgagttttttaacttatttgtagatatcatctcatcttttagaaaaattatattagtgaatttttaaaaattagttaatgaagaatttatatttatttataaaaaaatttatctcttttttttttcttcttttaaaaatgtttctaaaaaagtttactcaaacacgccaaaaacaaataatggtattttatcacacgtgtttggttgtttccaggggtggagtgtaaggaagcttaaaatgtcatttacatctttttttgttgttgtaggggttctacataagccttggattagaggtactgtattgggggttaactgtgtgctgttttggattttcagatcttaacactacttgtgttaggtctgtttacatgctttataaatgtatattttttcttttaaaaaaaacaaaaatcttaccaaacacttttttatcacgaaatttgaatgaaataaatattttctttaggtggaatgaggaaacgcaaattgtatgccaattgaggaaaggcccacatcaaaccatggcaatagcatatgcactacaatgggataagggacaacgattaacatgattagacgaagagttcatattaaataactgtatttgaacacatttagcgatgcaatgcatttacctgaataaggagtatctgcacagagctcccgaagagtagtcgttgaagtcaaagagagttttggacaattgtggacaatgcgatgctttacagtcagcaattcagtcccttggtgaagggttgagagttgcataaatattaaaagtttcagttttggaagctcaactttggccttttctatctcaccaccttttcctcgtttaaatccaataagttcttctagttcagtcgctccatctatgatcagaagctctaggttgggaaggtcattagatgcagatgcagagaataaatgtttcaacttgtggcattgttcaacaaccaccacttctagttttgggaaacatggttctagagaaacaagatttaacatttttttatcttcttcgatgatctgctttaattctttgcattgtcttatctctagacgcttcaactctgataggcatcttaaaacacacagaggaaatattacttccaatcttgcacatctcgttatatttaatgttccaagatttcggaagctaaaagaattcctggaatatccttgttcaaatccaataatctcctctagttcagtggctccatctatgataataacctccaggttgagaagatcactagatgaagacgcagagaagaaacgtttcaacttgtggcattctttgacaaccaaatctactagttttgggaagcatggctgtgtagaatgatcagacaattttttatcagtcacgtcctcttcgatgatctgctttaattctgtgcattctcttatctctagatgcttcagttttggtaggcatcttaaaacacacgatggaaagattacttccaattttgcacattcctctatgtctaatgttttaagatattggaggaaaagtgaattcttggaagccacccaaatatatgtcatttgaggtaggtcgcacaactccaacttttttaacttcaatcgcacttgttgtccaatctgaatgttttttcgctgaagatgttcaaaattattatgagtctctttatttaatttcgcctggcatccaacaaaagagacagataatatatgttgtaaatcacacccttcgatggatagccgtttcaaacctaagaacattgaaatatcactctgaaattcacgatcatcctcaacgacgttttccttttgatttttatgacctctttcacgagttaggatatgcttcaaaccatcacaatcttctataattaattcttccaatgaagtcaaggttttagccgtggatgccgtaaacaatgagcccaatttcggacatgatattagctcaagggttgtaaggctggatagagtaaacgatcctgaaaaagcagttactcataagcaaaacattgccatgcatattagaatcaattatataaatgttatgtcgtcaagttacactttgatttttaaaacgtttttttttttttggactaaaacaataaacacaagcatcaaattaagttaataatgaagaataaaatcattctaggacaatattcttatgctgattcatattatgactgaccttatcttctaataattttatatggaactaaaatgttaaaaaatgaaaatgtaaatcttctttgaccatttgataaataatgtatgcaatgttctgacaattagattgcttaaaattttcatatatgataatagattcacaatttaaatgtgatttgtaattgtacatgtcaataacttcaaacccaaacacataccttataaattttaactaaataattatataaaattataagtgtaatataagaaacacacttattgacttaagttcaacaatttagttcttaagggaggaatagagctattattcatttgctaaaattttacggaaaccccacttgataaaattaaattataatgattattggcaatatttaagaaaaattatctgcctttaatcattgcttagatcaataatcacttataatgattgagatttaaaaggaaaaaacttggaatgattgcaataaatcatatcaacagttcatgtaaaaagaaatgcacatatcaacagttcaacatactgttatgagtttttttacgatgtcacaattgaattcatgttgaatgctttgttttgtctaaccacaatttttgttgaatatgcagcccattacaacacatgtatatttgctaaaagcctataactgaaaacatgcttatgaaatgcaatatggaatgtgtacctgagctatggttcataagaggtcctagtggaattgaagtgctttctgggaaaatttccaattgattagcttcaaaatgaggattcaaaaactgttgatgttgctcatattgaatgattttatctaattcttgtttttgatcctggtgtgcaagtggataattcggataattcgtaacaggtggtgatgggacaatatcctcaactagttgatctagttgattgcaatcttttatcttcaacactttcagttgaggtaggcctcgaacagtattggctgagaagacatactttaattctctacatccacttactatcacttcttgaagattctggaagattgtggattgaacatgactttgagcaatagcatgcgtgaagaaagatgtcaactgtggacaattacttaaatacagcttctctaatttctcaagagggccagtaggaggtatacaaccgtgccataaaacttttaattgatccatcttgtatattttcagcttaagcaacttggagaagagaattcccacctcactcaaatgattgctagtgtcaaccaaacactctatctccttagaattacatatctcgagcttcttcaactcatgaatatctcctttttccaattgaaatataccagggattatattttttgcacctccctgagtatttgctatgaatataacctttgctgtttttgccaaatcgttaatcgccttatttgatatgtgaaaacagctaagcattagagttcttttaggggagataaaatttgcatcatcatcatcatcatcatcatcatcatcatggcattggcttcctaattttattgtataccattgcagttcttgggggacactaaaggtgttaaagtatttaatggtgttttcattgtaaacattccattcttgctgtctattaatgatgctcaattcttctagccgtgggattctcctgaccacatcaaaattattcgtctccatgtcacatttatataacattaacgatttcaagttggttagttgtgcaactacaccatcattttgtaattcaaggaatgaaggcaaataacaatcagacaatgcaaggcactcaagtttcttcatatcacttataaatgagatgtcacttaattcccaattgctaaggattagacaacgaagttttttcaatgttttaaatgtcattgttgacaatggtagtttgtgcccccctccattttcaagatacataactctgagattttccattcttctgaaaatttcatctgatatttccaattttgtttctatgcaaagaaactcaagattggaacagtccaaatcatttggaaatttcacacaccatagatatcttactgaattttgctccaaagttacatccttctccaattcgcacttaatgagcttatcctcattctttgctatcaagtgggctacatcgcgatgaaagtcgtgcattttgacacatccatgatatgcatgcaacaataaacaagaactcaagagcttaattgtggctgcaatcacttcactctttgcctcttcatatgagcgaacttccccaactacacctaaccctattgcgcatcttgttaaaatttcagttggaagttcataatcttcagggaatacagaacacaacaagaaaagtgttttggcttcttcactatccaaattatcgtagctcaattgcaagcatttgtagggatcttgcaaacctttttcaatattcatcggcttagatctttttaatctacccaatgcaaccctccattccacttcagccttgcctttcaaagtgctagcaacagctgcaatggcaacaggcagccctttacattcatttgaaattaatcttgccaaatgctttacagtatcaggggtgccttctgttataagtgctttctcctggaaaagagcccacgcttcttcactagttaagattggcaagtgaatctttctttggcaatccattgaagtacaaactgcttctgatctagtggtaatgagaaccttcaaacctttatggtgttcaaaaaagggaatccctatggcaccaaaatcaagcttctcccacacatcatccaaaatcattagaagcttattttcttcggttaatctcatgaataagcgttgggctctctccctttctcccgtttcattttctggaaacccataccccaatgaactagcaatttttgcttggatccttcgaacctctactgtactagacacaggcacaaaaagcactttgtcaaaaagaccctctgcttttgctatcttttcaactttcattcctaacgtggttttaccacaacccgccatcccatacaatccaatcatgacaacctcattatctttcagtgcttccattagtttctcgtaagcagattctctactgtcaaaatccatacatttttccgagagaatatcaagtgtgctagaaggaagtgtagtagtgcgttcaatttgaatatatggtccacctttttgaacgagcttttcaaggtccctagttttatttgctaacttctttcctacacagtatcgccaaatccaattcggagagtgcccaaaacaacaacttttttttgttcttgcctctttcagcaactgattcacattgtctacgtcattctcagcatcctgcagccactggttaacaacttcagcaggcgttctcgtttgtttcttggcatgtgcaacaaatttttggacatcatttttcgttacaatcaaattgcgctcttctttctcaagctcttcaatcaaactgttaaaacaacaaggataacgtaattgatttattgctccacacactaaatctcttgaaatagaagatgcaaaaccgtaaaggcattccatcaatttgctccactaaatgcaactttctttaacctgaacaaaaaagatgaacatcctacgtagtaagtttataattaattataaaaataaattatgtatatacatattgaacatatacttattagataaaaatgattttaagataatttattttgtttacaactttatctaaaaatcacttttatagtacaaaaaagaagttatggagttagttgtagtgattagttttaatgttttatatttaaaagatttaaatattttggagatccttgaaatatacttgaattttgtaaatgattcctgaaaaaaaattacttctcattgagtccctaaaacttcaaaagttttgtggaagatacatatcgttagtctccgtctaaaacgtgatgacgtgtccgttagttggacacgtcagcgatacacataagaattggtcaagtcagacctccaaacgaatgaactgttgacatccaaacgcgtgaactacaccatctcctcctccttcgccaccctcttcgccaccgtcaatggcttcctcacctccccctccttccatgactccaccggcaccgtcctcccctcctccctcccaacctactcccccctcctcggctagttccccgctcgtttctagcaatggctttaccattgcatgagatcctagtccttcaatgaaatttattagtataatttcttataccgtatgggtatctgactgagccgaatgctcataaatatccctagtaatatttttaggacattaaagcatatctcttctaaagtactcaagtatttggttaggtcgaatactcttatcaccttttcacccaaggtgatctctctgcataagtactcaggtgttcgattaggccgaatacccgagtactctaaatcaccttgtcacccaaggtgatctctctacataagtattcaagtgttcggctaggcaaaatacgctaatctccttgtcacccaaggtgatctctctacataagtacttaggtggtcgactatgtcgaactcctgagtactctcatcatcttgtcacccatgataatctctctacataagtaccctggtgtttggcttagccaaacacccgattactctcgttacaatgttgtctgaaaggggtccctgtatgtagtcaagtactcagacctagtcgaacacctaagctcccttgttacttatttggaaataaaatgtctagtttattctaaataatagtaattaaggattaatttaatcccttaatgatgattagaggaacattacctataaaggtaaccatgtgtaagagtccatggatcgacctactaagttatgtataaataattacgtgaatatcaagataaggacattattcattttcatttaatacacttgtttattgctctcaatcgagaccttacttaagggttggagtatcttttgttgatatcccacccttcgaattattgattattatattgtgaaagaaagagattctcaagaagaagacatagggaagaaagttacctatttcatgcaggtacatttctattataattttttaaaaggaactaattaaaaaaaaaaaacaaattattgcaaagactaaaacaaataaaactgatgtattagtggggggaaaaataacacaaaataaggaccaaatccaagaaaagaaattttcaaggatgaaaagtaaaaataaaaataaaaattagagactaaaagtaaaaaaaaaaaaaaaagttatatcttaaagataaaaacatatttaagtcaaaataataataataaaaaatacgcatgttttatattttttgcattggcaggattcaaagatgagtctttccataggctctgaataagttgttcttataagctatttaaaaacattttataaacctgtcataagatgttaacataagataagttcaaataagcttttaaatgggcctaaatctaaccagagcaataacatggatttcattaaaaataggaattaaataaaaaagttatacagaacaaaatcaaaattagcttatttatcaaagataaaaatatacttaagctaattattatactaaaagagcaagtcttggtcatttttttatatatacctttctctaatttgattttatcttttcgaaaaaaccagttatagtattgctaaaacaaatattggttctctcaattttattttatttgtatttataagaatcaatagatattagaaaagtctgctcttatttttaaaatcagacgagtcaatttgactgagaatcgagttagtatctaattagttaattataaaagatggatcattgcgaaacttgtgagaaccaataaatatccggttaaatagatccaaaactagtaaaaatcaataaaaaaaatcatgtaaaaatagggttgaacctatatttttatgtttattttacatttgactaaaacaattttaagataaatggaaacatatatttaaaaaacacagcaaatataaattgtttcactaattattaatattttatttataaaacatataattcagtcatttatattagtttatcatttttataattttatattatattaatttatcattttcttttttattttatatgaaacttatcattattaatggacacatattttattaaaacttaaactaagtattatgtatagaaaattcatatccacttgttcttgtttttattttatctataggtaccaaagaattagcagatttagtagccctggggggaaggagcattgatttggattttggactgaacatgtcatccatgcaaataggaaatgagcaaaaatacgtaagcttacctctcctcttacagaagattcaaggaattgagttatatgcagagattggtgagaaacaagtgtagatcgatgactttacaagcaagagacggtgaaattaatctaggacagttgcgttacgccacaaacatatatatgatctgcagactcccaaaggaaattattatattagaatacagaaaccgcaaaaattgcaaattaaacaacttgctgccatatttttaatatatacaccaccttcagagatgaattccattgctcgaatctccaaagaaacaagagaataagagaatcctcactcacgctccactgctgcaaagacgattgctagcactactattcccacacgatcaactaatcattcattttaaaaaagccaagtcttgggtcttttgtcttattcatgctataaaagctttagtcttggtcttttttttttttttcacgagttattattatctacttttattattgttatctagtcgtcattgtcaatgactcattcacttgtcctgattgctcccttagttttgggggcaataacgagtaattaacaacataacaggttaaaatcagaagtgcccaataaatttcatgttgtactcactttttctaagcgtattattttgttgatttttattttaatgttctccttatatacgtgtttggtttaggagaaaaaaaaagtgtatctaatttatttttacgaacacccttccttttttaaaagatgtagtaatagaagcctaaatttcatgttgtagtaagttaaccatcgaacgtcattctctactttattcattcaaagagcatcattttgttccaaggaaggtgataatgaactcaaaataggaacttggaatcttaagaggataccgtgatcaccaaatacattgcaaatcacagagaaaggggatggaatttgctagtcatatactcaggtaatctaagaaagtactagaatctcacactactaaagagttatacaagggactctcaactccctccctccctagattagtagattatatattattatgatcaatttacctccttctgatcaattaaagcattgtaagttacaacttacaacactaaaatccgcagttgcattttgaaattttatcacatcttaaatgtttttttttttcatttttcaaatttaattttcagattgtcaaatttaactacctgtataaataaattattaaaataaaatttaacagagacaaatggagagtatacttagaataacaaggagtacaaaaagaaactccctaattgttttatgttgcaaagtttaattatacaaaagattataagttaagtccaatattgaagactctttcttttcttgttcttatccatataactaagttctgagttgtgacgcactgaggaggacacactcaacctttcgactttatcttccatacttttaagatattcttgttcttctaccagactctattaattttgtatacataatagcggtgcaaagccaaatataatttgatcatcatcattttttatttattgaacggttgaaatcaaatttataacatattcttcattttttatttatttttttaaaaaaaatccagccttcttagtttttataaacctcgctttttgttttttaaatattcgttttaaacacgaggaaaattgctaatcatttgtaaatgatatgtttagaatgtgatggaattcaagattcatttcatagttttctaactcctgacgtttctttttagatttttaaaaattataattttcttaagaaaataaataacgaaaactaattattatttttgttgaaaaatgttattccaaataagtattaaaagaatgcaaatactgggccttatttctatttcactcagttgcttcattgactcctattagctatttgcaccttgactaatgcaatttcggaacctttcgcttcgagtatttttttccgggacataatacaataggtgtttcaagctctatgtggaaaaagaaacgtagaaaaccaagctacgtgaaaatattgcagcatacaataccagaaacaaaacactcatcatgaatagcacagtagttgcacaagactttcatttcagtaaacaattaataacatagtagcctccgaaagatgataaatttggtcctttaaaaaagcaataaacaatgaaaatcctgaagactcgagggatttctagcagcgatgggattgtgctcaaattggctacacagagcccaccatttataagcgaaataattcttaccgaactttgctttgatcttccaccatttttctcacattttcaagctcctttttgtaccctatagtttctgcaatgcatttcttcttttactctctcagagatgataaggcggcctcacagtctttcatttcttccttcaatctaatgaaccgttccttcaaaacttgttccttctgttgagcttcatccatgaatgtccctgcctcggatatttttgaaacgagtaatggctacctcgtcctcattccaatgagcttcaagcactgccaacttgtcagtggtagcaaagccttgcttgaaggaacatagaatgcttgggaactctctgtgcctggtgtctataatatcttcaagtccatctgatagagttgcatctttgaaaggaaggttggacaagaaattaagtcttttgccataattttgtgagatcctccattttgtgacactaaagagcgtccacaaacattgcaaataaaaggcagtttggaattgcttaaaaagttcctctgcttctattttttacaagcagagaggtcacagacaatggtaatctccaagtttaactaaagcaaggtatcttaattacttcccgtaagatcccaatatatttggtgcgatggatgctatttcacaccggttttgcttactttgtgttataaggtgttatatcaatattacttccagttctttttcttgcattgtagataatctcttagtactctctttacttattttcagttttacacgatgctcttattcttgttttaagagttttgtccctgatgaatttggtttttatacaaatcttcctttttgttttttacaaagcaaggactgtataatgtatactttatctgtatactaatattgaaaaaggaattaggcatccccctccctctttggctttttataaagtgaaaagcctaactatatcactttttgtttctcaatcaaactacaaattgtacataaaaatccgggagctacaaagtgatttcacatcagaagacaagaagagaacaaccaagttatggttgatggtaaactaatctaacaataatatacacgagaattaaaattacactagagcaatacagtttttaacacattgacacatacatttagacatttaacactagaaaactggtacaaccataaagatggtttcaatttctgaatggttagcagcaagccagcaacactggtctttgagttgcaggtttttcacaaactctttctggtgccatcgtaacttgtgtcttgctattgagactccaattattcaaaactctagcataagttgaatccatttttagagttatctaatatgatatatatattccaacagtttgaaaatctcatgacttctttgtgttagttcctctgctgatgattagctggaattggaaattgccttggggttctgctgatgtcacgtgcaatctcaatgcaagcttgatcaaccaatccccagaaattcttgactatgacaaatagttgactattgttttctgcaatctcttttgaagctccaccttgataatattgtgttactttactaagagtaatgagactgaattacgcaaactatattcccctactctctgttcatctgaagcaacattgttctcggactatccaacatatataagctaagaatgacaatcttgtatcaaatagaaatttacaaaagccagtgactatatattatgacattaacaaatgatcatcaatgcatgcatgactcagttttagtcttttagaagcaaaatcttgattctcgagtattcacgtgaactcttgtgctttatatctggcatgaaaataatctgtaacacatataacatcaataaccattaagtcactgtcatgcttctaaaataaatcaaattgccaaaataaaatatgccagtagttttgttagcacagacttatgctaataaactcatgcatggttgcagcttttaccttaaaaagtaacattgctgcagcctgcaggcatcctatggtttgattgatgaacatagtgtatatatcatgtaatactcttatcccttgaactcacgtaaacaatatatgcctcgggtttgatcatctgagtgatagaatgatacatctgagtttgtaagctgattgattaatgtatcctataagctaacacaatgacagaatgatacatctgagtttatattgaccattgaccgcagtcattgccaaatttgaacattgtcatatcagcatgtaaggtggtaggtccattttgattgtagggtctagtatagctcctctgaaacttttgaacattgtcatgtccatgtccatcctgtgaccccattaccgttgaaatagttggcactaactagaatacatactttcatatccattctactggcactagttagaacaaacacgtgtaacttcatcaaatgaatggatttcacgcccattttaggcacgtatgagtatgactgtacgaccaaatggactgcttgctggcactgccatagtttcaatagcaagaaagtgcccctcccacagcagttctgacaagttatgtcaagccaatcacgaggttgacaaattgaaaagtttgttatctaacatgtagatgtagcattataagtgtagtttcaataagagtaaacactagctttggtagtcatcactcaaaaaggttatcaacgttttagtactaagctcaacaatttgttttggaacccgttagtattcggttcggaaaaggaggatcagtgacatcaaattaacaattttctgcatacttgctcacttgcatacaatacaatacaataatcctcttaattcttcttttctctctttaaagttgttggatttaaaattgatttcagcctttaattgaatgaattctttaccaaccagtaaaaactggtcggaaatagagttacaagcaggcaatctgtcctgacctctctcacaagagttacagagaagaaactttaccaaacaagcaatcactagatcttaaagtctaccagacaaatgttacaaaataaaatttcaccttctaaaacatccgttgttaatatctcattggtctctaaccaagagagacatagtgtacagttaaatctaaaatactctgggaagaatgctaaagcacaacccaaataattgttttcactattgcataacctacaaagcatttggttctgtagcagcatgaagaagctcatctggagttgcagccggatcaaggtcccaacacctttcaggcaaattgctagcctcccccttcagcaaccaagaaggcacttgatgtgaaaagcgcaacatctctcttctgggtatccattttatggcactcttgtctgtattactctgatatactgttttaaatccagctaacttaataagaggactaacacaaacaccaagttcctccgagtaatcatccagcacctcaaccatttcatactgatgcctcacttcatctggagtagatctgttccaatccgacgaccaatttcgatacacagcccaaatatctccacttctaggatatattcggacgcaaccacctcgagcagccttctccttacttagaacatgagaaaatatgttaacttgatcaacagcatctgaattaaaagccctgaaatttccacaagatttggtaaaacctgaatcaagccagtttactgagccaaactcactatcagttttggaactcaagtaactgatgtgaatcttaaatggattgacagacacaacctcacggatcatacaatacaaccgtggcattccatcttcctcatcatacaaggcccatatttgctttggcctgaagcattcctctgacctatctttgtcaaagtcatgaaagtcagaatctgggacagtaattgacattggaccagttttcccattctctaactgtagaccagaaacattcagagctgcttttctacatgtctctcttcttacttgaccaacttcagcttgtgatttttctctctcattcagagctgcagctactgctgctgctgttgcttcagatgacaacttcatctcctccagtttcttcctgatttctttcctggctttctcaatcaacaattttctcgcgtcaaaggccggtgccatgtaacattgtttggtttgaacttcaactgtgcaggaaggcttttggcattgtcccatgctatcatttccgttagccactatcaactctgaagcacgttttgaacccttttcttcatagccatttctgaaactggctcccacaacaactttctgtttcttgtcaggtctaattagtttatcttcctgtggttcactacaggagaatattatgtctgaatttgtattgaccatagtctctaccatgtgatgtctcttatcagctcctgacttgacttttggtcttcccctcttcacatttccattggcctgatgaacagaatcagcaggtaaggtagctgatccattttggttgacaactccagcagagccccactgaaatgaaacattggggacgtactcatatccatgtccagaatggtatcctgtgaccccattcccattgaaatagggggcactagttggaacatatgtaactccatcaaatgaatgacttccatacccatttcctgctacatatgaccaaggacaatatggaaacgaaccatttgctggggccgccccagtttcaacagcaacaaaagtgccacgacagttcttacaagagagtcttttattcacatacttgcgcagatactcatactgaaccttacaagaggtgcagattgtccaaaaggtgtcaagcccaccacgaggggttgacaaattggaatatttgttataacctgcggcccctttagcatgggcaggagacaaattcgtctggttagtcccacccaactgcacatttctcttgagatcataagaactgcgcatagcactatctgatagccaagtccaagcctcagaaacaagcttaaatgcctcatcagctcccacacatttgttcttatctgggtgaagcaacaccgccaacttcttgtactgtttttttacagcctccttatctgcaaaaggttttaatccaagaatcgaatagtaatctagctcaccattatgtttgacctcagaagcaatgtaaacttcaaatgtggccaccatttgagatataccctccaatcctggacagagagttttagcctttacagcatagtttttagcaccggcaaagtctctcagagcaaagcgcttttcagcaatctctatcgctttaagtgcttcctccttgtttgcttccatgtaggaacaaaagatcacttcacaactgaactcttgaaacagaaactacgaccagcccaacatcttttccaatatcatacataacctcgtttccatctctgcaaaagttttgaaacaaaaaaaaaccaagtaagtaattttaattttaaaactcacaaaactttcatctgagatccaaaaacaccaactcaaacattttcacaaaattaaacagacatttgccaacatcaatctagaacttatgctccctattgttaccgagaaaccaagaaccctccatctcaaatacgccaaaaatgtggaataaaacgaacagatcgtggcatttagttgattgaaacacaatttttgaattttccacataaagcattaaactttactttccagtctatttcctaaatcttccaatttcaaaatcaataaaacattaatcaacgggtagaggtgacccatctttcaatcagcacccaattcacccaaatttgacaaaacctaaaacttttgcgcatagatcgaaagtcttaagactaaaacccccaaaatttatactcataatttaaattaattcggaaaaaaaaaggcagatgcaataaaaataatcacaacaattaaaaaaaaaaaaaaaactaactgagattggagacgataatggggtgttgaagaagagccagatcgacacgtgtagttacgagatgaagcaaaattgtgtgtgaatctcgcttcgctaaaaacaggaaaacacagaacccgatttgtatggacacagtggtgtgtggtaaatggtaaaggtgaagcctttgctatggaaaaacaaaaactgtgaagaaaggattcgggtggctctcggatccgaagtgggtccgattcggcgcaaggtggcggcgatgaataggagcttccgacaatcgccgatcagaaagagaagagaccaaaataaaaataggaattattataaataaaatgatgataattttcagagcaagtaaacgctgttattactgaggtggttggaacaagctaacgtgcaccgtaggtgcgtaatgactaaagactgcatagcaaatttattattatttattatttctttttaagaaaaaaagaaaaaaagaaaactactaatactttcttttgttttatgtttcgcattttttttattgcatcttaaatttagtttaaacttatatattttgcggaagttggaagttagagactgtgttctgtagttggtgtgaggttggatgatgatttggagaattatcagtgatgggcattgggcacttgtgaatgctccacattgattattttatattttatttttaaaaacaacaaaattatttaatattttcccatcttataaaaaaagagaattaatataagatattataaaactatttaaaataacccactagtctaatgatgcaagatttaatataacatttttatttttgacagttaataaagataatttaatcaattcaatcttataaataaaaatgaagagagtattaaattcaaatttgattggtattattgtagacattttaattggttagcattaaatacgtatttatggagtcataaatgactgtataaatgtaataattggaattgggtgtataatctatctacttttattttagtaatctaaacttcctttttttgtgtgtgcttgacttactactttcttacacacaaaaaagaaagactttatttcttcttcttttttggatgcaacatttttaaccattttatttcacttgggtttacaatttttaaccagtttggtgcgattgaacttgcaattttttaggttgagttctacttaaacttctgagttctgacatcgatttcaagttgtcaatgtcaaataatttggacttaaccagcaaaaatatggggtctctgaaatatttatttgggctaacggggaaggcccaatgacattcgtctctgaaagtaacaaccaaattaatgtaatgtggtgaccaaaaaaatattaatgtaatgaaggaccaaaacaatattaatgtatcggttgaaacttgaaatgaaatgatgttgagtacagaatcaaacggacaacagttgaatcttgaaaaatctggttctgccaaaaattgaagtggttggattggatgcatactttgagtcaatgatcacagtaacatgtttgtttgtccactgggttgattgtgtttgctctgtctcaatcaataagaaggacacttgttttttttctttttcgtattcttcaacactactcatactgtaaaataatcttttacggaggtgaattaaattaatcaacgaaggagatggaagttttgattttgacatttgaaaattttgtgctaccccgccatttcaaaaatagactattcagcaaagaatttttcaccttgatttgcccgtcttattgaatatgattatctagtaaaaatttgacgtgatatcatattttttccatgattgatatcattaaaatattacactttatgcccgctttgtatccgttttagagtattgtattgtagaatttgctaattacaaatattctcaacagttcaataagtttatatatttgaatgtctcatcagtaaaaaaaaatagtatcatctttgttttttgttttgtttttttttaagatggtatcatctttgtttttacttatatcaaaaactgaattttttctatgattgtctcaaaattatatgcttattaacttactcaaaattaaagcttagtctttgatagtttccgtgaaagttaagaagattcgctagccatgggctttagtgcacttaggtttgtttttctatttaaaaaacttggctatagaataagcttttaaatatgcctttaaattaggttgaacttttataaaagttgtacaaaaacttaaaagactaatatcaaagtaaataaatcatgttctttatttgaaaatacatttggtatatatgactggtagattcgaagacaaaaattgaagtttttatagtgacatataaattaggtgtatttctagctaactttatatatatttgtatctattcagtaaaaaaaatatttgtatctattttaatgtcagtttagttttaacaattataaatttataataatagatcatatcagtaaatatttaataatttgataaattttttggaacaaatttttacaataatacacgagtgagagaaattaaaaagaagaaaaacatatatagaaggaatggtgtaataaaaagagataaaataaaaaaagtgaaagtgtacgtaaaattatggtaaaattttgttatagaaataacattactcttttgagagaagagagggggggggggggggaacacattgttactgaaaaagttaaaaagtgaattatctctgggcctttggagtgtacgaataacactttttttttttgtgaattacgaataacacttctaaactgggctatagctcccaattactgtaataaattataaatagttaatagaatatcaacggtacttcccaatttaaggaagcaaggagggcaactaaaaaaaagaaaaaaggaaaaggttactggcaaaatcaaattaaagaaaaataaataattttaaatcctcaaacttcattcttctacaaatttatctactatcttttgtggtaagtttttatatttttaagatattaaatattttatttttattcaatacttactataaaaactagtaagatgatgaagttggatgatataaaacattactcaagaaaaaaatggaggacgatgataggaagtaataaagcaaagtttaaaatagagtactagttcaactaattaaaccttggttaacaaaatcaattgattgtcaaatgaactacctagcttcatatacacaaataaaagataaagacccattcatcactgatccacgcttatcacaactttttattgatatgtgcattaagatataagattgatatagtgatggaagaagaagataaaaaatagttaacaactttaaatttatgagtaataacaactaataatactaatcattaatatttgctgataaaaaattctattataatataatataacaaaaatatgaggaaattaagagatgagaataaacaaacaaattggtgatattttaatttggtatatggtagacaaatcaataccggggcagtacgtgcttcttatttcctgggcaaggcagggaccaagatttgattattattttttttttttttttggtaagatatcaaaggaataatgagaaatggtggaaaaatgagagatgatgagatcagacgttgacagtgttgcagaggaacatgagggacgatgcggacgcgtcgctggggatccttccactcccgagcctctcgtagctgtcaatgcaaaacaaggagagcgagagctgcacctcgtgccgagtccacactcgcttcctcacccgctccgagtttccgagtcgactcagcaccggtctcacgcacaccatgtacagccgcttgtacccgcccagcgctaccaccaccgccctcaccgacgccggcggcggtgaggatacgtggcggaagcacaggtgctcccacagcgagtcgtcgttgcgcgtgaggctgcaccacagtcgacacacgcacgccgccacgcccagcgagggaccgtcgaggcgtttaaggatttcccggagaatgtcaatgttgtcgtttatgaagaaccgatgtcgtttctcttgctctccgcggtgctgctgctgcaccatagttgcggacatgcacgatattattcacagagagaggaaaagagaaagagaagatttatctagctagctagtggaagtggaatggttggtttaagaagaaagtgtggcatgtgaaagatggagcagcataaatgtggggtaacaatattaggtttcttgcagtgaaactgtatttggattctctagataaagtcccaagttttaatatataataaatataattatatagggaaaattttattaagagatcaaatttcattaaaaataattaaatatatttttaacaaaagattaattatcgacaaaaaaaattacaaaatgtttttggagaaaaatattcatgaataccctattatatatctaatgtgagaaaaagaaaaagaaattaaatattataaggattatgatgtaatatgaaaaagagaaacaaagaaaaattataaatattaactaaatgtttaaaaagtgagcataagtgtgtgggggagggtgggttttaagtgtgagaagagaagtatattttgactttttggggaaagaattaatgaataataaacgtgaacttgtgaagggagagaccgtttacatttgttactacgttggattgttgtttgttgttgtggttggacttgttgttgtgcatgtagagagagaaggttaattgtgagtatcgaggggagagaaggggccaaaaggaagttccaaattaaccaaagaactggaaccaatgcggtgcttttttcctcttgttgcttttctatataggtttcggggtgagcagatttggtgtttgttgtttttgttgttgtttgcattcttttccaataccttgtatcaattgaggaccgttgcggatcagagagagaagaaattgagttcgctaactttgaatttttctatatatgcttcgtcgtgctgttgcatgattaattgtcacccagtctatgcagacgttttgtgtttttttttctggacgagactttggaccatatattttttttcatttttcaaaataaagtagtataaagaggttaaattcaagtatactcaagtgtgaatttgaggcttcctacctttctatggggccatgccatgcctgtttcatcaccaaaaattgatctatcagttcagcctacaagtctaaaaattgggaaacctataaaccagaagcctcccacttgaataagtatgttggcatatcttattattgagtgtgttccatttcatagtagaaagcattgatcttgaattccgttaaacttaatttagtaaaaatataaatgtttgaatatattgttggataaaactatttttactttgattaaaatcctggtttgactaagaatgtgtttggttacacattatgcatgcatatctaatgaaattgtgtcatatacaaataaatgaaatgacgcgtatcctatgtttggttaggcgttgcaaccacatcaaatgaaaaatttagcattctgagacaaaaaagccaaagtaatacctaaattgcttctgcattgcgttatatccaatgttatcacagatacacacttaaaaaattataatttatagttattagaaagtcttaaacaatgtagttataattatgaatgcatgttatctaataaaattatttcaaatataaataaacgaggtagaagtaataatttgtaatttccttctaggtgtggaacttcacgtgcactaaaagtgataggaaatagtttttgttttgagttgaaaaatttatattaatttttacagcaaatttgtttttagtttaaaagaatctaaatataaattatttttacttgaaaatcaattttaattaaaatttattttacaaacactcatctaaacataaaatattattagtcaaaaatatattcttagctagacgtagtgttatgttatgtatgatttttaaattaagtaattaataaatttattatatatgacaaattattataaaataattataaaatcattttatattattaatttatcgactattttacctttatattattgtactatctttcatttaatatattatgtggtaaaaaatgttaaattatatttattcttctttattagttgaaaatataataaaaaataatatacaaatatcattaatatgttgactattatttgcatatatataccactgcaaagttggatatatatatatatatatatatatatatatatatatatatatacacatacatatacacgtgaatagctggcatatatatatatatatatatacacatacatatacacgtgaatagctggcaagtgcgctgataaggttgaaaactctacattcatgcgatgcatgactagtaactaggtacaatatctagcaagagttgacctccatgtcaatgatcagacctcgatctatataattttgtaacattgtttccctttcctacgctccaagcaaaactttggattccaacagttttcaagatttgcttaaattatctttttaatttgacttataccttggactgattctaccaaatgtttcatttaattataaaaacaaagatacaactgatgcactgatgtaattttaaaatataaatatagtatgttctgtttttttttaatgaatcagatatcccttttccgaatctcaaggatcaaaatacttaaatctggaattaatttctttcaatatatttttttaacttaaatacatttttttatgcaatttaatcatttttttagttatatacttataattttttcaatttaatctttacaaaatatatttattttattttttcattcttaaaatgttttaaataacattttgaataataaaataaaaaattacaaaaataaaataaatactaaattttaggaaaaaatatatttatatttatattttttcatattcacatgttaagaatcaaacgcaagactatacatatttaaaggacaaaattattcattaatcatatcacatacagatgttggttggtctgctatgttcttatttcttgctaatgtttaattctcatgatatagaattaaaatgaattattttcttaatagctatgccataatttcctttctttttttattaaacttattataaaattcaaatcttaatgaatatgtaacgcaaaatgaggatatctttgtatttggcaagatgaactgcgttacttaattaattatttgatagaatatacattttaataatgatcattgacttgaacaactataatggtgatcgatgcaaataatataataatttgcttggatcaggaaattaagaaagatactctattaattaacttgaagacaataagatgaacttgtatttcccgttccaatcgagttggcatttgaacaccaaaacagtgcaattcagaaacagaaagagaacgcactggagcaagcagaagcagaaagaaatttttgctggtgaatggttagaataaataaatggaaaggaaaggaggatggatcatgttccaccaaagaagtgcctaaagtaatttccttccattgtgaggcacacgaatagaaaagtcacgctacagtaattttatgtttttgcacttgatgtggaatttgaatagcaacaaagaaagaaagcaagaaagaaaaaaggttttcagatgacatggtgaggcaatgtctcacggggttggattttctcccacaaagaaaagcaaaagccccaagtcctttgagacagaaagcataaaatataatttcatttagttagggtagggggggcttgaaattgacatttgatttattaattaggcttctgtggagagagactggaccccactcactcagtgctgcaatattagagagtgtgtcataagaggttgtttttattaggttggacttgttcgttggacacactcgaggggtagcactgttccctattcttgctcttagcaactcgataactgcaaaactacaaggagatggccgtaaagtaaagtttgcaaccaaaaatattttcaccgatattttttttcttttcttttcttccccaacaactatcctttgtactttgttcttgtaaggttttgcccacatactaattggtcaactagctagtatatgatcagagattctaccattgtcatgaccatacgtcaacatagagcagagttcaattatagagccaatcatctgtgaactgtggtccactgttaatgtgattatacaatctcatcttctcacttacctttctcctgtattcgtttcttgttttctttatcgtttaattaggactttctgatcgatcctacaaattattgttgtagatagatcatgtaacatatataccggctaacccaaacattagttaagatgaatattttatacataaatcataaaaatattttaatggctataaagaatagtcatgtgatgcttaaaatacaaagaaaaggtcaaaatggtatattcacatcttcttttttcccaatcgggcgcttctttggttaaaagtgaagtatacctcaattgtagttcacttactaaatttgattattcctataattataagactttaataaagagatattaaagtaattaattattataaaattcaacaatttcctattatattatacgtcaaccaataatttgataatttattttaattaaattataatttagaggtttgataaacgaaaaagaatctcactctaattccacttctctcccaagtaattatttttttcatttttcaattaaacaaacatatagaaacgatacacgttaagttttcaaaatcgctcgaaaatagcaggatttctatcaaactaaagttgtttatttttaaaattactaaactagtgtagtttatttacaaaaaaaaaaaaatcaatatgggtaagtcttgcttatattatttatttattttttaccaaatgccaaaaacatttatgactgtccaaaattaacagacattactattataaactgtaaaaaaattgcataaaaagtttaaaaggaaaccatattcatgaagtgcgacttacttatgttatgtgggtaaatttttaaaaactacacttgtttagcaataattttaaaaacaaaatacactaatttggcaaaaagacaaaaacaaagatcgccactggatatcatgcctatttggctcaaaattagagtacgtccaattgggtatcactccttgtgtattactctcttcttttttttcttttgtctaaaagaataaagtattgtgtggttattaatggtgtatcaatattatactaggttataattaattagtgttagagaaaatatataatagcataataatgatttgtgatctcgcaattagcagaagtatgtagtgataaaagctttaaacaacatccacagaacaaacaaacaagcaagtaaaaggtaaacagaaagacgagggggaaagcaaacaatgcaatgacagccagggttctaaatcaacgctatctcctaactactctcttagctaggagtgggtaactgtggaatctgatctttattttgaaaatttagctaaatgggttgtgtttttcttcttgtgtctttgcttttgcatgggattgaggactgatttattaatttctcattattcattccctttgatcaaggggagggaagaaacttcctcaatctggacactaaattcctagcctgctatctatcacaaatcttgggtacgtgagtagtgaaaagctctgacaaaacaaggcatctttaaaacagtgatgttaagcataaaatcaaataactatgtggctcagaggatgccaacaagtcatacaagcacaagggaagaagttactattagtggatccaaaattaaacttttttaaccatcaaattattaattcattagtgttacattgtcccaagctgtccaaaaagagaggcagagttgttttgcgcgcattgcagcttattacatactactgtatgtactaatttatggtagttttaactttaagccctaatcattcaagctgatggaaagtggacaaaaagctgtgtttgtgtgaataaaaactgcaccaacagaaggggcagtgccaggacattattatatgaataaaaattgtgttggtaaggggggctgatatatgctaggaaattaccagctaagaggagatttacttgaattatttatgtcaaattttgtaaaagttggacaacaatacaaagaatagttcttattttcatttatttttaaaatttgaattaggttaattttgatgtgcatcaaaaagatcaaataatttcggtttgatctatatgatatatctttttaattcaattataagttttttgttgaaagtattcaatgaaatgttattgaataatgtaaaaataggtataactaatttgagtcaataggcaaaagaagagtgcaatttgcaaagcaagaacttgagcatgtgattttgggactttgtcacattagtccgaaacctattaaggtaagatgagagtttcttacttgttgttaggtctaagagttataatttatttgacgaattgtaatttttattgttagtttttttattttttggccaactttattttaataaattaatttaaaatattttatcttttatttttaaaatattacaaattttatttttttcccgttaaattgacgtaacatgctaaaataattttactttttattcttaattttttactttttagttaattttgcttcaaacttgtttactttttagtgaattttaaccaaaacttttatacttatgtttcccctaattacacttatgttaattgttaactcaacaactaaaattcttggtaatttctctctttctctccctccctcaaaattttgacttgttttgattcttgtgtttgctatatctgtgtttccaatttatacccctttgattgtgagtgttttctctgttcaagccagccaacaaacttgataatttataatcatataatgataaagagtaaactaatgttagaatcaaataaaaatgttagtatttttcttcctctgattctagctccgcacacacagtacgctcactcaccacactcattggccattattaactaattgaaaccaccagatgtagtaggaagattgagattagttacttgttcgtttggatttttatccacacaatttggatgtacatccaagaaacaactagtagtgcgtgtttggaatttggttaagaggaaaggaattatgtttagattgtgaaagttataattgttaacttttgacattggagacttgaaaaattacatttaaaaccgtgaaaccaaacaagctttgatacaatttcatgtgaaatttttgtgaaaggtgaatgagtgattaggatccaaacatgtacttagtttgaatgatgtgataagaagaaaaaaaaaaaaaaaacaaagtgatttatacttgcagacacttccaccaatcatattaattatttttgtctcctcctctcatctcttttaaggttagagcatctttagtggtagatcttaaattgagatcttagactactttttggtagaccatataatactaaataggattaaagatctcttaaaatctctttcatttttttatttaatggtagatctcattttgagatcttaaggagagagaaaaatgaagaaaaattattttttttaaacaatgtgtagatcttaagagatcttccacaagacctcatctttcatgatggagatctcttcaattcctttattgggagatctaatgaagatcagatcttaagctcaagatctttgcttaagatcttgcactaaagatgctttaagtgacttttaatttaaagtgttccaaccacattctttcaaataaaaattcttcagtattaacaaattcttgataaaatgatattttacaattaagttaatatggttgagagatgttttattaaacgtgatcaattatattttttaacgaaaattaattattaataataaatactttacattaatgtcatggtgagaagaagaatgatattttactgttaagttaataatcattggcaattagtttagttttattcacttggtaattgaatttgaaaagtcaaatgctattgaatagtgtatgagagacgacagtgagacaggagggtaatttggactttggacatcttcatttgggccaaatgatgaggcccacaggctattacaatacgtgaatgttggaccacacagtccacaaatccaaagcatcctaaggtgggttgcgctaaaagtagaaacagagaaagttgctgagcacgtgtggctggcttggatagaaagaacattagaatttagaactagtagttgtgattcagtgcagaagaagctgcttaacataaatgggatttagaattagcggttcctcctcttcatcatgcttttctttgcaacgtacgcttcttcctccgttaacagcgatagccacttctactcgtgccttgaggatgaggaggagtaattgcataccaagttgttcagtatcttatcaaaagtttgttgagtttgctttggatgaaaccaaacgccacactcacttgatcccttcgcctttacaggtttctcttattcctttttttttttcttaaaaaattatggccattttcctgtatgtgttggactttgaatggttgattaggattagttagttccattctggtattgaatcccaagccaatgtgaaatttccgctttgtagttttttaaaacttaatttgcagaattcttcaaaccaaatttaggcagtgtttggtatatgtgtcagctgaaacggacaaaacataatatgtgaattttccttttatgttgcatttaaaaatacaacaggacttaaaagttgaaacaaatgcacattggggttctatagaatgtgtgaaatcaaggagaactgagcgaaatgcaatatttcattatgttttgtccatataccaaatgcaaccttaccttactgatgcatctgtacataatcgaagcaaattttgataaaatactttttttcttttttagatgaaagagttatatgttaggcctttttgccaacatatgtgacctttttgctttataaaaactaatttaaaaaaaaaaaactacgtaccctattgtccggagactccacgctatgcgcagatagggggtgggatattgtacacagctttacccttgcatatgcaaagaggttgtttccagattcgaactcatgaccaataagtcaccaagacacaactttataaaaactaataactaataattttttattggtaggcgtaaaactataactttagtagacttaccctttggccgaccctgaggaagaagagaaaaagaaattgaatgaacttctctatagaacaagttctctggttagtgctcaaaaccaagagattattaccatactttggatgacagtgtttaataaatataaatgaagtaaacaatcactttggtttggtcaatgtttaataaacatcttccatttattatggaagaaaaaacatgagatgaaaaagagttttattatgactaagtgtcatatcttgtccttttatatttttgtgttgccctgttgaggatgtggtgtactgttccaatcaccaagtttcagcttctcaggatagaactagctcttcaattaataagccgttaacttttattttcttgctgttattgagttattcaactttgtatttcgtttatattttgttatagtattattttaaatttagttttattgaacacataattgctttgaagattcttagttgtgaatttctgtccctagttgttcccgactcctctgctttgttcgcttaatttgctctccaccattatttgtgtgcatagatcttcaatctacatttttgtatgttgtcttgctaggaaaagttcagtttcatgaattccaaggatgttaaaggaagtcttagtacgctatcatttgaagctgcaaaaattaggcttctacgaagtttgatcattgagactgaaacaatgcaggtgattttttttttatgcctatcaattatcaaattgatatatggttggtatctactactgtcttaacacaatatgcctttgtgtagtaccttgtaatttattacagcaataacaatttcaaaatttgactttgtctgtatttatttctgccaatttcagttttctttttcctttaccaataaaggatccttcatctataacaatgcatgttaacagaattagtaagcatcctgttgtatctgtttcaatatgcaatctctgatccccatgaggtataacacttgtcggaatatctcataacatcaatattatatcttggaatattttagagtatcttagaaattctcttaggattagcttatgtgatttctcagtttccattttcctaatgttttatattttgcaattctatttcaagttttcaacaacacaagaaaaaaattgacatgtcattgctgaaatgttctgctgtcttctgtgtcctgtctgtggaaaggttattttacaacatgcttactgcctctcttttttgtcttcaacttcttatgcaggttttggattttactgtctttccaaaagcagaatatgatgtccccatattttgtgctaactttttcacctctgctaaaacaaacattgttgtgttgtaagttagcatcttcttccactgttgcaatccacttatataaatgtacaaaggatgttcttctcatattttacttttagttgtggaaaagtctagcaatttgggctatgtttgcaatttttaaacttattcctaaactgcatttcagcttatggaaatttatgcatgggaatgcaatattttcccatccaaaaagaatttaccattaattatgaaaacctatcttgggttgctttgcaaatcaaagtaggaatcattcagttttaaattaaaaaaataagccagcctttgatctatgtgaatatatactttcaagaggtacacacaacagagaacttttatgtcttcatttgggtgtggtaaatgcatatgtttcattgcctactaatactcatcaaagtaggttatcaagtatcaactagtctcagtaacaggtattttattatacttggtaaaagaaaataccatatttcattaggtgtaaatttacttgcataatcacttgaagaggatgtttcattcttttgttaaataggttcatgtatcttttatggtatatttctcattgaataaaagcatgcatttccagaaaagaagattgattgtggaggaattgtccacacgatgaaccaaacggagcttgaggggaagagtgaagttatcattttaggagcagatgtcctagatctcaatgttagtttaagcaagagaaatagtagttgttttactccagccctttggttttgctatttttttttcctatgaaccttgaaaaagatgaagtatagccctaatcagctatttcattctctttaaaatgtgatcttgaaaccatagttcagtaaatttgctatatttgtcatcttaagatatcatatgtcatattctatgtaaaggagattttagcattgaaagcatctttggttgactacttgaaattacattatatgtaccaaaaatgtccttgttggccttcgcttttcattttcttatgtattatagctttacaataaaaaattagatctgaagttgatgtatgctttaatttgaatttgtaggcttttggaagaagattggtattgactcctcttcatccaatcttagaaagaactatttggtgaagctgttataataaatgagaaaaaaaaaatgcctttatcagtaaatacaaactcaaggatttaatgtgtgctgcatgtctactaaagttttccacctactcagatgtggaagaatattatagtgtcatcctttttgataatctactgttagccttcttatgttgcattacttatccctcaatttaattgtttttagtcatattgtcagtgcatgtactttatataatggtacttgggagtttatacttggccaaaataacataatgaaaaagaccatgctttacctagaaataaagcctaaagcaaatctatgtgacagtctgtagttctcatttctccccaatattgtttacaccttaatcgttttagaaatctaatatttgttcactgacatcattggtaatgcgaaaaagttttcccccactgtgctattgatagcttcaaacattttttaagaacaaattactgtatgtaatgcagagcactaaccttgaattaattatgtcagggaccttaaccccttgcatgatatcatcaatcagtatgagtacaaggagaagtactttaaaagcttaattcctcttggccttaaatatgctgaggtaactgcaaatattttagcgaaaattataagaattattggtagaagtattttcagtttagaaacagttaatcactcgactgcataacaatgtgcaaagttttgttaataacagctacttattgacctgattagccacatgagtgatgcattgttctaaaactggatatacttttaagttttaatacgaattctacattttttacttttccatttagtattgattcattaaaaaagtcctcatcatggatgcatctctgtttttctgtaaattatagaaattctttcttaaatgacctagtgtgttgacttaacaccgactttatgcagctttttccatggggagggaagctcacaagtgagtccataaattttttttcgccaattgtcatctggacaaagtttacctcaaacccacaaaaatatgatattttgtattctgcatttagggaatattacaaggtaataaccccagcattatggtcaacttcttgaatgactattcatattttgctaaatactccctccgttcctatatataagacctttcaactaattcactctctttaataaaattgattaatgtagtttgtgacattaaatttgtcaataatttatactattttcaaaattacccttaatattttttaaattaatcatctctccctttccacttaattttttcctccctcattaattaatttttggagatagagtaatgattatgtaacttgtggctactcatcttctccaatcataataagagaaagagtttatcttgttaatttccagcatatttttttttgctaaaaaatttgtagttaattaaggatattttaggaaaaaataattaatacaagagacaagtagaaaatggtcttataaaaaggtacaagaattttctgaaaatggtcttatatataggaatggagggagtataatatatttagtgaactttaataaaactgaccttgtacacgtgtaatttttttctcttgatgactgttaccctggcaggtatggttggaattgatatgcaaagcagttaaagagacagatgaatctcagatttcccacaatctcgaagcacaacatagatatctgacatggagagctgaaaaggtagttcacagttgctaaattttctgacagccaatcataaatatgattgctgatctagccataagcaaacttatatttgtcccaggtataattggtttaggattttctaattcaccaaggatctttactcatttagttagcatcggttgaagataatttagatgataatattaacaaagatggttatgctgaatttgatatcttcaaaaaagctacctaacttattgtttctagagtaatgtagaaagctattttctagcattcaaatctcaacaataaaattgtcaaataagtttggaataaattttgaacttcgaactatatagaatatataggacatgtttggataaacttatccaaaaacacttttaggtaaagaaaataagaaggaaaaatgaaaaagacttctccataatctatttctaattcagttttaccttttaatggacctggttcatggacatacttgaaattaggatccgggacaaggtgttttgaagaagctgattggtgacacacttgccaaggtaggccaaatttgtggtcgatttatttaattcctctacaacctagtaatacacatcctcacttcctgttttatactaggatatgttgagaagctttctctttaatggagtcgatgaacttggaagcaaaacattcaatgattattttccacagtactgctgtcaagagggaattctaaataaaaaaggcaatattattgggaagtcctttgaagatcgcccatggaatgctagaggagaatatattggtaacagattttcaaattggcttgtctagttgctgctttcttttcatctctgcttggtgtgttttttatcctgctcctctattatcattgtgtttatgttcttccatcagggtcctacaagtaaaaaaactatgctgtgacctgcattttcttcttttatacgaaaattggttctgcatatttatctatgacattttgcatgtatatgttcgttgattacttgaagttgcttaactggcagtttgatttgagatgcgagagacattagggcttggattctattattcatgattaagaatgagatgatttcagtaatgaaatagttgtatcttttagcaagctagcaaatacttttgtagaagctagcacttacaagcatactacatatagcggcacaagcaatcttcagaattataatggtatctggggggtgcctggaaaaaaaaaaaatagacttgtgagaaagtagttcacaacttttataagtttaataagatttacagataaacttgttaaaataagttttttttaacttatctcagtaattctgttaattttatgaacatatttttatttggtaggagtatattaaataagtgcttaaatgaaattctttatttaaatgcatccttagtttctttccacagaatataaaaaaaaaaaaaatgcattcttattttataattttaaaggatccttcagctggattgacgtcgatgtgtagcctgaaggctaaggcatacttaccggggtgctgacatttgatctttttggaatattttaggtgaatgactgtatacagtagaagcttgtgcacacgtttgcagtcaaacttttactaggcatgccactggttaaaatttcggcgatagcggttctgcaagcatacaaaagacagctgcaatttttttagacaagttatgctataagatgcttgtaacagatatgctatgtcgacacaaatttttgcatggaaagaaatttctgtaacaaatctcaggctcagcacctatggctgtgcgtgtttgtaattttaacattcgtattggaagattctagttatatatctgcagctgtgtccgattagcttcaagtcctagatatttaagtgtaatactttaccatgcagtttagattaatttgtataacccaaaaattgtcactcgattcagtttttgggttaaatcaagaatttgttgaatacgattgggctatttatttggcatactggctaaattgggtctctttgtaatttgggtctttttgaagttgtgaatttcgagttgatccaccagtctcatttacttatgtctcaacctcaagcctataggttatgggaaaggtagtttataaattatctttaaccttgattcttaatttttggtttactggaacaatttatacataaaaaaaggattaatagcatgttttaccacaattttcattattttacaaattttactttaaagtattttttcatgaattttatcattttaagatttaaatttttatgcattttactgatagtcatgtgtcactaaaaaaagttattttttacaaaaagatgtcgttttgttatcaatataataatcaaatgcaaaaaaaaaagaatcaagtggtaaaaataaaaaaaaaacttgggtggtaaaatgtgaaaatttaaaatttaagtgataaaatttgtaaaaaaaaattgagtgattagatttgtaaaatgataataataattgaatgataaaatatacaattaatcctaaaaaatcatataactgtaaaaaaaaacggtctcctttattttcttccttgaagtacaatcttatgctatatgattttgatcatacgtcttgatgtgcatgagaacctaacttttttgtcactattgtacaaagcatgttgtgattgcagtttggaaatgtccaaatcttggtttaagttaaaaataaatagaagtttctatcaaaatataatttaagatttttcaactgaaatctaaatgaatagtttggatacctcttaaaatcaattttaattcccagaaattatgatgaaaaatttaaaaagttgaagcaattatttgttggtttggcttttcactcgatttaaaaattgattttgaaagaattaaaggttaattcaaacacacacaaagaaattcattttcagattcgagtttcactcgtcggtatcattatatgcggcagcccaacagacaataagataagaaaaaagttgaatagacaccttaaactcttatgtaatacctaaaatgtttaatagagtaaaatatataggtatggtaagattttttatatgataagaaaagaaaaataaaaaagtattggtgagatatttatatatcattattcataatataatttctcaaatccccatgtctttttagatacctaaaaagacagaaaaatagaagaaataggctatgataagtaaatacaatatgataagagaagaaataggaaaaaaataatcatggatctcatgtttacatgattgaggggttgtgaagtgcaggaaaaaataatattactctatttttatttatatcatgttatcacccgcatcacttgattctttcataagaaagaaaaaagaaaaagaaaagaacaaagtaaaaaatagaatgaataaaaatagataagaagtataatagaaataagaatatttggtttgagaacaatagtgacaaaataaaaggaaaatattactatttattttgctcatttttaaggagaaataaaatagtgagagtctggtttttttatttctcattcaacttatttctcctttataaaaaatatatatttcttaggataaataatcatttttgtccatgtctagagtgctgacaaattcgtttataaaacatgaaaatttcaaatttttatccccgaaagtgtaaaaaattcgacaaattcatcattccgttaacttctttctattaccattaatgaaagtgcctacgtgacacagagggacaaaaatgtcacaaaaatgattatcaacgtggctgctaactagattttgaacaaaaatgttagtaagtttcaattggactaaaatgtcagtaattttctgttggacctaaatgtcattaagttaccattagaccaaaatatcaataatttttcatttgaccaaaatatcagtaattttttttggcgaaaaaaggtcagtacgtttccatttgaccaaaatgtcattaagggtaaatcttccctcttttttttttatcattacaagcataataataacaatataataatcacttaaaaataggaaagcaagcataagttaaaaaaaacataatagtcactataatatttattaataatcataatttgtttgtcacaatagaaattatctaaaataaacattataccaatgtaccaaaataaacattgtaacaacatattaatcattacaaatttatttaaattataataattactcacaatctattgatatgcttgtctttccaaaataaatattataacaatgtattaatcattacaaatttatccaaattataataattagtcacaatctaccaagactgccccgccaccaagattcgaagaagtgaaatatgggatatacttgtcttttatttataatatattgtgactaattattataatttgaataaatttgtaatgattaatacattgttataatgtttattttggtacacagatagaatatttcttttggataatttctattgtgacaaacaaattatggttattaatcaatattatgactattattatgcttcttttaacttatatttgctttcctattttttaagtgattattgtattgttattaatatgtttgtaacgataaaaaagaggaaaagatttacccttaatgacattttagtccaatggaaacgtactgacttttttcgtcaaaaaaaatactaacatcttggtccaatggaaaagtattgacattttggtccaattgaaaatgactaacattttggtccaatagtaacttactaacatttaagtccaatagaaaataactgacatttttgtccaacggtaacttactgatattttgttcaaaatctagttaacagccatcttgacaattatttttgtgatatttttgtccttttgtgccaggtaggcacttttattaacgacaacggaaagaagttaacgaaatgatgaatttgtcgcactttttacatttttgaagacaataatttaaatttttatctttcagaaacgaatttattagcgctagacacattcaggaacaaaaatcactatttaacatatttcttatctttctttttgttttgttttgaatctttccctccatttatttcgcaccaatcagaacttttagattatgcactaaacagtacataataaggaagaatcaattagtggggttgtgaagtccccttgttttcttgaagtcacattttatgcatcaatatttctacatctcatgtttacattaatctttgaggtcccttatataattctattgctcaaaactctattattaaggcgtattttcacttatttttctactagtcttttgataattccctattcaaattgaaaaaactgaagaaaaataaagtaaaaacaggttctagctaaagaaaataaggaaaagtaattgcagctaatcatctctttcacacagttccgcatatattctgcaaaaaaaaaaaaaattgtattatactatatgaatgaataattcttgctagctacttcaatttattaaaaaactactatctcctaaattccaacaagaaaaaaaagttcatatttgaattgtaccatcaagtcgtaaagtgatccctccattgttcaagtgctcctagaagagtcaaaaggacataatttcatattgagataatgaagttggaaagacatggtcagaagttacattccattctcgatcaatctatgccatgcgcgtatttaaagcctaaaattaaatatgagggagagagaaacatcgaaggtgcagccagcaatatatattagtatatcagaagcaggtctatatatatagctagggtggctaaggtatgcattgcagcagtagcatgcagcagcagcagctacgatatatcagcagcagacagaaagacagaccagcagaagaaaagcattgtcaagcatagaagcaggagagactagggactagagagcagtagtagaggctaccaccatgcatgtctctacctcactttgtccttcattcattccctcttttaaatgccctaataaagaacttgtcattcatttttatcataagcttttaattttgtaactgttcatgcatgtacggcctttacatttttagttattctgtataactaaaacttcaaaattattttcctgcttacttgcacttgcggcgtctcttgcatttacacttacgtagtgaacagtatttatatgaattaatagaagcatgcttataaccaacgactcaagtttggcaccataatggtgtacgtactcccttgcaaacgcgatgatgatgtgataaatagtaaatgatggggtattttaaaaaaatcacacgtgtgatcaactttaaatttagatgtttattaggttcttttttattaggtataaatacaaattttgagatttctgacagggaagaaaacttaaaaccttttctgtctttatacattttttttttcattcggttcttaattatatggaaaacatttagttcttatacataccaatatagaagaaaacaaaacaaaactcatctacaaccaatgtacactagatgtctcagcaaatttaatcacaggtttggacctttaaaaggatggagtctcctgaaaaaaaataccaatgtcgtttagcacccaaaaatcagattgcattctctcctcttttttatcctccttttacctgactttgaaacatcatgtaaaattgtcatactcacctcaagttatgataatattgttcaaagcttgctagtaaatcaaccttcataatttctcataaatcactttaactattaattaagcaaaactacgtttgatatactctcatttacaagttccttgagccaccatgttaatcacaccatgaaaattgtcatgagttgcttgtattttcttcattcataaccatcatatcgaaaccaactaaaatccaaacatctttgccacatactcaaatgattgataagatagctttactcgattgatatggtgattaataataggtataaagaatagtattagacagttcagtaaaggtgttttaatttgattcagcttagaatggaagagaaaaaaaggaaattaaaaacaatgtagtttgattttgagtgacagagccattaatttctttcatttgatcaggttctattaaataaacttcatttagttaattttataggtcaaaagtcattatcaaatttgctcaaatgcgatgaacacgggtaatatagtaatagactcctgggaaccatgttaaaattagttttattttaaaaacggaacttaatgaaatataaatgtgttttattattaaataactgtaaaattagtatttattcctccaagttcagtgcccaataacatacaataattaaaaattataaaatatgggtaacaagctgaacacccaacaacatttataattgactattggaagatccaagtgaacgcatgcatgctagattgccacgtttttggacttattaaactctcaacatctactaggtgcctgcctcggcctgtcttctacgtagaacaaatagatagtgaccaagggagagaaggaaagattaaatgataatagtaataactaataacaataacaatggatgtgatttttgtgagagagagagataggtacaaaaaggaatgggaagttagaatgaatgtgagcatagtactcctaatactaataataataacaataataattcctaaacctaggtctaactaaggatcctgtacaccaaaatccaataagttaatgttattgtcaatggaagagatagccacgtgtctgtcattggccaccaagctattgacctctccccctctcaccccaagggtcacacacaaccgtcctatcgcttgctcaatgtcccaaaccctcaacgaaggcgaaggcgcaggcgaataggttaacgcgtagccaaggttaatgcaagcccacaacccgtgaacccataataaccggttcaaccgaaaccgactcaaccgctccaaagtgctgactcgccgaaccgttcccacgccgttcctctccaccaccacataagcatcctgactcgcatccagcgaactcaccacgaaccctgtcgtggaccccacgtcacgcaacaacacctccgggttccgaaaactgaaacacaccaacctcgaccccgtgcacgccacaacatactcacgctccgtcacgcgcacgcgccccacggcttcaactaactccgtcagcatatgccaccccataaccgtttctggatccgtcaaagaaccaccaacgaacacgcgctcctcgctccgcgcgtcccatatctgaaaagcccggcccgctatcccagcgaacaggcccacccaccaccggcccgttcccgcgaacccgaccagcaccccgttgttgacaacgtcaccctccacggcccggcgagcgtggctgggcccaggcccaggcccgttcacgttatccacgtagatatccccgtccagcctggcgaaggcgatgttggagttgaagataacaatgcctgagacggagcgtgagaaaggcccgaagaggtggccgtgtagggacaagaaggtggtgacgtgggcccgggtttcgaggtcgaagaggcgcacggtgccgtcgacgaagccgcacgccaggtgggtatcggagagggagaggcagcgacagagcaggttctggaggaggtggtgatccgaagggtcaaacaccggtgggtcgaaaaacctgtgtatccctgtcgagaagttcctggccgtccgatgccaatacatgtactccagctgccacgtggccctcagtcgataggtgcgtcgccatatgcgtctcgtgagccgctgccacagcagatccgaccgcgacacctctcgccacgtggaacatacctgcatgcacaattttttaacaaacctagctgtaagttaaaatagctttctaatgcacgcgaccttgattgataaattaagcaattccctagaattatttatccaaaaatagaaagcagagaaattcttttgtttataaaatcctgttgcataaaaacaaaagaatatgtatatttgatttttgtgggtttttttcttctgaactataagtaggtagaatggattaaaagggtggagagagaaactattgaagatggcagaagcaggtagctactattagctaaagctagcagagaggtactcgggacctaagattattagccttcaaatgaagctaagcttacagtacctagtagtaaatggcttctcatttaatttttatttattattatgtcagtgtacttattttcagttggatactttagaatcttagataataataatgacaacactgctatatggcatgccttacgtatgaaatatgcataagctcctacacacggaattaaattaaacaatccaccatgagctatagctataatcttgcacgatcttattgggctagtgtgattgtgacagacaaattatttgtaacaatgacaagtccatataacgaagtgcaacttttacatactagaataagcacacagaaaagatattctatggatatactatttcatagaggtagtcaagtaattgtcaaatgggtcaaaagggtgagctaggtctgactagtccagctagaatatgagctatctatcaacttgccttagaagagaaaatttaatagaagaaatgcgtagaaggattagaatatactacaatttgaattgagagtggagagatctagcaatgagtgaaaagaagacacagatgagatcagatcatggcttgtataaatgtggtccattacttagcagggatacggcaaaataacgaaactagtcaatatcttagttactgttcgtgtaggcatgtgtgtgtgtgtgtgtgtgtaatgtaaacatgggtatgaaaagcgtgcttccccacaaacatttcagtttcatttccaagaaaggtgtggccaaggggcctgtcttgtttcaaacagcgaatctctagttctatccacgcacacaaggaccagtccaagcgcccctgaagggaaacttagactagcaaaatgaaggaggaattttccttaattagtgttattaaatgtgaaaaaataagttttaaatatggtttgcatatttaataataaaggtacaggtgaaatttttaacaaacaaaaaagaatttttcataggtttatatgaatactttatacattaataattataatgtttataagaggcgttggtacataattttatccaaaaagatccacctttatcgagctgttatagtttttaagtacaaaaaattaaaaaatatgcatgccccaactcccgagtcccaactatgttgtgtgtggtgtgcaattatcattatcataacgtatatagtacacatcatatgatattagtatttaatttattgggaaagaaaactaaaattataataagtgtgaacttctcagataaaaacaaaaggaatggagtgtcgccacgacatgagtagggctccatgtgctttttggcattacacaaatgctgctttttgaccgcatgtatacatgccagtttagattataggatattaaaccgacgactaatcaccggttatttcaaatgtttcaaaccctgattgagattagagaaggtgcgaagtttatgcagcaaccaaatgcaattggtatttcctatcagaaaaaatatactcctatattgttactaatagagtagaaggaactttttatttatcaattggaaaataaataccagagtaggaggacactcttaaataaataatgtaactatgaatctcttctttatttgtgtgagtgtaatgaaaatttattattattattatttttgttacgaattaatgtaacttcaaatctattttccagatttcaattgcttggaagtacatcaactgactagtctaaccaggcaagcttattctttgaacacaaacgaatgattagagaaagctaattaactttcatactacagttaaccttctatcaactatctcaatctcaataatattatatattattaagattaagaaaaagaaatggtgtccttccgaaacattatatattaattatatatgcaaccaaactgaaacaagcttgataaaaaaaaatagtacattatcaatgctccaactatatatggaaatggtacacttacaaggacgctaggaatgagacataaataactatatatgcctccctcctaatgttattatttcagaaagcaacttcttttaaaacaaagtaaaaaagctagtatccacatattttgagatagaaaggcatgcaatggatcttctagcctagatagcagggaaaagctcagtcaaaaaggattcatgcccagaaagggaaacagcaaatcgaagccaatgtaagccttttcattggttgtgaaaaggaggtccaaaactagacatttttgaagaggaagagagaacagatattggcaagaaggaaaaaaaacacccttttttgaaagggacacacatttagtttgaaaaagacccacgtaaagtagctgctttcgcggaacagtttcttctcggttggttgaaagcatcttcaactaaaacctaaatcggcactcatctccccttatacactgagttgaataatgtatgcctctctaaagtttaaacaatacacacaaaaggaaaaaaaatccgaaaaaataaaataaacggatatgatatacacatataatattattaattaagttaaatccataatgtcgatattattattaaaataaaataaaaagaatcagcatctgcaggttgcaatgctaggttcacgtctgacttgaccaatattttgtccagtttcggaactgaaaaagctatctgttacgcatgctgaagattctacaaatattcattttaagcaaactaagaatccatcatcagattaagtaaggcaaacacaaccaaccaatatgagcaatcatcaaaaacttatctttcttaacaacttctctcatagcaagcaaaaaagttaaatggggctaaagaaattaattaagggggatatatattaaggtggtcttcaacctttacattcctacttgtgagacttcgataatacttgtatttcaaagaagaagaaagaaaagtacctacctgaaataaaatggcaagggcagaagcagcagaaagacgaccattgtagttggcagcatcaagggcaagttgggtggccaaagcttcaagaaaaggctcaggcaagacttcattcatagcacgttgacgctgagaggaggaggaagaagcttcaaattgaccactacgggtggttctcctcgtactagggccagggatatcaggggcaacagcgtcatatggggttgaagaagaagttgatgatgatgaagaagaagaagaagaagaagaagaagaagaagtagaagacatgagtgtgtgagtgaagtgtggaggctataaaagtggggaaggaggaccagaccagaccggaaagggaacaaggacaaaaaggttggagataaggacacaaagtgagggacccaaaaggaggaggtgtctgggaattcttccttatactatcatactatgtccatgtcttgtgtatctctaaatctctatacctagctaccactttaaaaccaaacctctgcatacaccatacacctttctccctcaaatttgttccactcttcaataaaataatcatatcgttattaataacaatataataatagtaataatatattattaatactatactatgctttttacatttatgatatttgtggtttctggagatgtttccgcactgcgaggacggctgtgggttggtttttcaatccagctatagcaactcaactggtgccatggtcttcaggtgtttttcaaatgcaaagtggtggtggtggtcctcctcctcaaactctccctcttctctacatttatttctttttcttgatcttctactttgtcttcaagtgcattttcgattcgtcaaattagtttattgtttttaagctcacttttcgattggtggaatttattattgtttttcaaacaaaagttggcatgtgtctagattaacttatttttaaattctttatgattaaattatcatgtgaaagatcccacttgcatgaaagtggttttagccatgtatatatgtataaataataataatggaatggaactgttctactattatttgttttcttttcttttcttgttcacacttagcaacacaatcatactcctctaaaaaaacaaccatacttagtttttgttaatcatatagcctttattaaaactaagaacttgtcattttttttaatctccaatcaatttttttacaaacaataaatatttataagtaaggatgataaaatgacaactcggcccattttagtttgcttggtcattaatctgccaaaaatgggctagaatggattggtttatttttaatatacggtttgaaaaatacagcttgctcggcttaagggtggcttagctgattgactcgcaaaaatctatttttttaaataaaaactaaagaatataaaataaaatgatgtcctaagacataatactaatttctaaacacatttgcaagccaaaacagattgatgggttgatacctttttctcaacccatctaagaaagtaggttcaatggactatctaatagtcaaatctattttgtcacccatatctgtaacaaaaaataaataaaaaatgaaataaagtatttttcttataagtttaaattaatttatgtataaaaaattattttttagaagacaagtttctcttttaggttaaaattagcttacaataaaatcaactttttgaaaagttaaatgaatttttttttcattttatcttgagataaactttttatataaactatttttaacttatagaataaacttatttaatttattttttatcttttaagtatttatgcaaataaaatacaattatagaattttatcactactttaaaatatacaagtaaattcagttcaattgataaagcgcatgtttgtattacaaaattgtcggcggtgtttgaggcagaatttaaaagaaacaccttcgtatattaattaataataataataaaaccttaacttacaagcctatttagcttttgcgttcatttgtttaggaaagagaagaccaatgagctatagagagagtgttaaaaaatactgatagtagcaaacgataatcatttctctttcaaaaaattattcacttttttataaaatatatttttttcatatatggaacactgggtcggaatttagttgtaccaaggggaggtgagattcgacacttattcccccactttcggtgggaagattcaatgcgactaacttgagctgatcttcacgatcatgagctaataaatttttaaaaataaaaaaatctaattattttttttaataataagaaaattaaattaaattttaaacataaattagaggatcaaataaataattaaacctaaattaaattaattataaattcagtacttaactcttattattaaaccataaaccttaaactctaaattttatactaattgtagttagtttttttggttcggccttttcttctttttttcttgtaaaaaacaaactagttattataatataattaacatataaccctatttattaaatattgtaagaaaaactaaataatctaatcatgcataaacaatataagcaattagattaagtgcgaaaaaattaagatcataaatacctcccgtcattgctcactgttttgagtctttggattgcattgaagatctctcttgagttttctaaactcttattctaaagcactagatggtgtatatgctgatgtatataaaatgagttcagggacccaagaaggctgtagacacacttatttatagaccccttgccatcaaaggttcagttacggtgtgttaaaagaatggacgttaacgttgcagaaaaataggggatgtgggtagtggttagtttcctgaattattgttgactactatcaggttggttacaaatattttataattttaaaataaaaaccaacaaatatgtgattaggaatttaatcttaagtttgtttatcaaatacatttattgagagaagttaatttcttacattatctccaatgtaggatcttaataccaattcttacaatcttaaattattagcatcatatgtaaaattttaagtgaaatgtttaataacgatcaattctcatacaattcatatggtaatagagtgcaatatctaactatagccttgctttccacacttgaccgtctttcattacgaaaattccaattaacttttgcactgcgatcattcaagaaggaaagcacaacactagtgaacgtggcctttttccttttaattgtttccaacagagaaaatcttggatggtcagaccaataagcactaagacaaaagtgagcgtgaatttactgtccctcatttttgtgccactattatgaccagtacatatgatttacaataattattatccgttcacaatcgactatctagagtatagaatctattggggggaaaaaatttatatcttccaatgatagtttcaatttgttttattggaaattttttcgggtttcaggttttgatgttcgaagcacatgcataacagcgacaagatccataactttgcaactctaggggccaatgccctttatctttctccatttgttttgagttttcttgagtgtaagtgctcggacagattgaactggggtttcctgatttactgtaatgctcctaattttttctgtaccttatttacttatattgatcagaatgaggtttcaatagaatgtgtacatatatataaattataacctttagaaagaaaaaagtcttggacctttttacttattcaagtccgttattggacctagtctcttcacttttacatcattagaaaatcttcgtgaagtcaagattctaatcctatcacctttaccttttattctttgaagcttttgaatagaataacatctttatcctctgctatttgtccccctgaaatttctattgaaggagaaaaagaatttctagttccaacactatggttccatttgtcactgctgcaactttatattatttaatttaatttgtttaaggaaaaaattactatttcacggatcattttacctcaagagtttggagtactccctctattctttataatctttttgtatcctggcctcaaagttcttatagatactccatccaagcttgacctgcgtgcgaaaatattccattcgaaaatttcatctcaaaagaatggtggtgaacacctaatttttcaaatatcattcatcaataaacctcatatttaaaaattagaatttttaagtactatataaattcaaaagaaaacaagaataggtatatccaattgattttctaattttgtattctagttctacgtattcaattgaataaaacccataaaacacaaagttacacaacggaaaataaagatagtgaccaaggaagtatattagaaagtcatccctcaacaattttatcaccagtttgtttaaacttatttgttaaaataaatatttattttaagaaaataaatttttttaatatatttgtttaaattatttctgcttaaaaaggtaattttttgtttattttaagatttacttcttaaaaaagtatttataaaaaaagatttatttttaagttattttttaaaagtttaaacaaattttatttgcataaatcttgaagaaacccaaaccaataccacatcaacaagagaaaaaacaaaattaaaatgggaaattgaaattccattctctctactatcttgggtgaagggtcagccgtaaatatctcatcctaaatacctccaaacagcgcagctcttgcccccccttcacgttcattattttctcgtgtcacaactcataaaagtatattttgtttcttttctttttagtctttaagtttaaatacaatttatattatgagtccatattttaaaacaaaatgaatttacatgaaatcctcacttcaaaactttccaatgtttcataactatttattttattttttatactaaacatatttttatgctgaaagataattatgttcaaatcatataacattattatatgcaataaactctttttataaacatgtaacatagttgtatgtcaaaaacttagtatgacttttaagtgttttgagagttttttttattaaaaatatagtgcttttcagtagaaaaactatcaaaacgtaatgaaataaggggtgcatttagtaattttgtgttgatggttggatatttttcgtgtaacagctttatattgatgcttattagaagagagggttaaaattggaagttaaatttcataaagagccccaacggaaattgaagaagcaaaagcatggcatcacttgcttttgagatgaacgtagattggagtcaaactcaagtgaaaaaattgtttttaggggtttccaatcatgtgttcaaactgagttttgtgctctaaaagcatgtttgaggttgccccctgaagaaccaaacatgctcttagtatgtacttgaaactcattttctaacacaagttcatgctgtctctccatgttgaaggcgtacttaagtgaaagtttctttttcttgtttccttttggacatgaatctcattgctccaaacataagcaaacatgtaataaaaattaagattgttggttaaacataaacaatcttactctaattgatgtacgagtttggatataattcttttacttttaaatatattgttttcaaccattatacagaacaacactacctacacatacttatacataccatcttatatttacttaatatctgacccttacttaattttacggatttttttagtgaatatgtataatttgaaattaatttaaaatagattatatttttaactgattaaattaaaaaaataattatatattttaagcataatttaggaagtttatgcatgtttagggtttccacttttgtcttcttggttttcccattttcttttctgtctcttgttacaacaaaaaaacgtttagggaatttttgtaaaaggaatatttacctagattcatttttttaaaaagtttttaaaataagtaattattttaaaattaaattaaatgtaatttatttaaaatttaattaatatatttgtttgttattacaaatacaaattttaagaaaatgtattctaggaaagaaattcaattttggaaatacttaaaaaattacatttatttctttttaaagagatgaataaagatttaaacctttgcctccctctgacaaattttttttgttgaagttattttattttttgaaacaggttaaaagaaatataaatataattgcccttttattttactctcatatgcgacgagttttttctgtatctaaagtttattctgttgaataaagtacgatattgatagaggcaagtgcagtcatgtgtgaaaagtatttttctttttacgtacccatcaaatcgttctttcatttgaaaataatcaaaatatgtcactcgagtcttgaccactgaaatgcatctcgtgagcagctttcatagccacacaggacttccatgcgggaaacaactatccataataataatatatctatctatctatattttttaaccatgttattcacattttttttaattataaagatcaaattcaattttcatctaaaaatatagtgtgctcagttttaatccaactataaattcaaataaaacatctcttcaaatttttatcaaaattcatattttgatgtaagttgtgggctatactggatcagataaaataaaacttatattcaattcaaatttttaaaaaacgagacccaaaatagtgaagaaatttttataattgttgtgggtctcatccaaaaacatctcttcgctattgtgataagaaatatacaaaaaattgtctcgttctgtgcgttgctctttttctacgaccacatgtagacaaaacaaaaaaagaggataatttgtcactcttgtcaccacaaattattttattaatattttttgttctctttataaaaccaaataataataataataataagagtatttatttttatctatttctcttatttattcttctgatttattctttttcattttttcccccaacccaacacaccattaaagatcaatctattacattaatcgagatcaagttagatatgacttaggtgaaatgtaaatgtgactacatggagtcaaaccaaaaagtctaccctgattcaacgtttgcaaaataatgtcaaagttttgtgaaataccaatttgcataagttttttttaggttaagcccaaatggttccatgatcatattaggctaaaaaaattaaatttattttgtgctcaagattaaagttcaaggctacaattcattgagtgtgcttcgagttaagtcgtttacatacttgatctggatcataatttataacaagttgagttaaaaagtcaaaatttaaattagatttctaaaatgagatcaaaacacactagaaacttatgttattcagactattgtgacctaaacctaataaaaaaaaagttaaatttaattcataatcaaaatctagagttgaatcttatatttttcaacatgtggattaaggccgagtcaattgtttgagtctattttgtcacctttatgttaaattgaatacttgcaggagatgaagaggtgtgaacgaaagtatcgaagaagatgcgataatattaaaaggttaaaataagattttttaaaaattcattttcactctttttttacccaaatagattttattttcaaatttaaatttgaaaactgaaacacgagcacctacaacagccacaagtaggatattaattgtttatcaaaatgttcttttttttttctaatagaataattataccttttattgaaaatgagattttaaatgaatcttaatctcatcatattttatataaggttccatacatcatatttgattatttttactatgatattaatgtagaatatctacaagttttagtaatgattaatttctattgaagaagtgattgattactatcagtaattttttttaatcatgtttgttattcataaaatttaaattcaagattttatttaagaaaaaaatgaatttaatatgactccaaaacccctctgactagcgaattattgatttacatcatatttgatataagtgatctgaatccaattttattaaggtgaatgtgatattggtataaaaatttattgctacatattaaatacaatatcccagattcccagttgttgtatagtagtgaaaaatcttaagacggttgattggtggtgtagtgttgtgacttgtgagtggtggggagtgtctaaaaagatgcaatgcaaggtgagaactgagaggagaggcaatacggaagaaagaaagaatggtgatgagatcagagggatgaagaaaaaagagcagaagacacggcaagattagattagattctggtgaggtcttaaattcttaatcacatgcggaaacagaacaagaacatcgaagatggagccagccaagccaagcagaaggcacagcacagcacagcagggctggctgggaagctatggcagaatgtgacagtcaaaagcaggaggagagactaggcaccagagagcagtagtagcactgtcagcttctgtctctctcattcatactactactatttttttttttttttcataaacaaataatgaaaaattcttaaaacacttttactaaccagcagtgtcttcaaaatatagttaaagaattaaaatcacagagtatttgttatagaaattacaagagaacacaaaattttatcaataatataattttatgtattttaatcaaaataaaataattctttaacttaatactgattaatatttatcttactgttaatcataaaatgtacgaatcaattagtttaaaattgtctaattagcaatttaaagtaacgtggtgaaagtatgaggcttattaaagttttctctttctttttctttattcttccctactaaaatgacaactaaattattatttgtaaatacgaaataataagatttactttttcctttgtgtattaatataaaattgtcaaatgctttcatatgttcagagtcattttcatattttctacccacaatgataagtttttgtcatatagtgatagtagcatagctaaaacaagaatattggcgtactatgactttctccatgttacgtaaacagcactcttattttgtcatcaatgtatttgtcaatttagtggaagtatatatattttggttggatccgtgtagcacagctaagattttaatacttatgatatcggagtacgtactacaacttctacatggtatatatgttaagaacacactgtttattttgtcacgatgtattcgtcaatttgggactgtttgttataaaattaagtaagattaattttgataaaattaattctaagctactaaaatatattaatttatttaaattataatttcacattaaattttggacttatggtgtttttgaaaacacattaaaaattgcaaaacgttaatccctaacataattaatagttacttttgcatcacttttaatgtgattttgctccgaacatggatctggaaagtggaaccaaacacgtatttagtttttaaaaaaggtatcccattgtaaaattgtaaaagaataaaaaaagaaaaacataatattgttttagttattgctgattagttttttagtttcaactaacaaaacaaataaagatagtactgtttgggttctaaaaagttactatataaactttgtatttaacaataaagtaataattcggagccaaatttatcgtactcctcgttcgaatgacaagagagaaaaaatgacagttacataaattgtttatactattcaattcaatttatgttacagagtgaggtacaccaagtacaatttttacatacacaatgaacattcaaaatcagaacagacaacagaccaacacagatatcttattgcagtccatacacagagagaaggcgaagtcaaatgggtcaaaggtttagagcggtcactgaacctaaaaaagtacgtattcatgattttaattaaacgtacctataattttttaacattatataacatttttaatcataaattaaaaattatacttatactgactattgttgagatgatgattgagtagcatgagatgaattactaggatacatgaattattgtaaatcctagacattatcaattcttacgggtcaaaaattttaaaattatgtaagacacctttgttaaaactttaaaataaatacataaaatacataaaatttgttttgtaaaataaaaaaaaaactatttttaaagtaaaaataatttagacaaatacaataaaaacagaaaataacttattatattaaaataagcatttattttaataataagtttaaacaacctcaccgtataaaaaaaacttacaatattgcatgtttagatacacaattaataaataaaaaattattatatgatatatagaataaataaaggaaataactattaaatttattaatccttcaaaggtttcacaatagacaataagtaaattttataatattagacatatatatatatatattaaaaaatatatttttaattataagtctcagatgagataataaattaaacattcaagcatttaacatatatacacacaaaaaaccttcgttagcgatccaaaaatcaatcgctatataggtagcgaatcggtcgctaattttcttggcattcagagaccgaacattgcagtattctaaaacccaagtcgctatagaaactgatttctgatttactaatacttagtatttcggtcgctaacaaaaatggtccgtcacagagtcttcagttgcttctacattttaatacttgcaattttcatatcagtaaataaatataatttattaatatctaagtgtttattatcttttaataaatattcaatgttaatgatataaaaaactaagtttaataataagttgtgtttctcaagaataaatttattattgaattgtaaaatttaatgattaatttatcattaagttatactaaaaatgtaagtgtcacaccttttacacatttaaagattatattaaattttttattcttttaatgattaaattatcatcaatatatatatccagagaccaaaattattatttacattttttttctttttaagatcaatatattgttcatttcttaaccattctgcattttattaatttctaatcatttttatagctttaatttttttaaattaccttgtgtcgagttataaatttataataatatcttttattttaaagttttaacttgaatgaagttaactattttatataaaggatttaataaaaatatctatatataaatatttaccactattttttcctcatatcttcgctattcctcccctcccttctctcatgaagtgataaactccactttcgtaacatgcatataatatattctcttatgtttttaaaacaactgaatggtttaataagttataaatgaatatcataaatcaattttaaatataatttttttgtcttcaaaattaaatatatttctaacatatgatatatcatgttattctttaatattaaatgaatgtttaacttaattttttacctctttcaatctatcatttttgatatatttagttctaacatgaatttgaatattttttaaattatcaacaattaaaatagcaatatatcataatataaatttctcatcctaaatctaaaatatgatatatatgttataaaaaattatttactactgattttaattataatatcatttatatatttaaaaatatttatttatttaaattttatttatataaaataaatatttattctatgcaatgtacataaatattaatttcaattaaaattagataacggatattcacaatgctccatcattttttttatttgtaagaaaataactagaacggattttatttataactattactttgtttcttgttattgccctcccttacaatcccataaaaatccaatattatccctccctaaaaagcattgtgtttctgttgcacaaaaggggtgcgaattttttgcacaataaaatcattattctattgcataaaggcataacggtttcgtgattccaatgtgcaaaaaattcacatacccttttgtgcagtggaaacatgataatgtaatgcttttcagagagaaaaaaaatatacaataaaatcgtgatttcattgtacaaggagtggttaaaatatgacagttctacgaaagcgtgatttcattgtccaatgaaatcataatttatttttgatttttttcctgaaaaagagaaatgtacattcagagaaaaaaatgtacaatgcgaaatttcgcataataaaatcaagattttgttgtgcatcaacaataccaaaaataacaaaattgtgattctgctatacgaaatttcacaacagaatcatgatttcgtttgaccatgaaaatgaaaacaaaatacttggcaacatgaatgtaaggtggtgtagaaaaagggtagtttgataattgtgcttgtctgaaaggggccaagaacaattttgttgggtcaatagtaacacccaatggcgaatgattgttggaaggggatattggatcaccgaattgggccgtacagaaatgctgttcccttgatagaaatttttttaatatctttgtaacgcttccttaaattccttctcacaatataatttaaattctacttttaacatggcaattcatattatgtttacttataaatagtattatagtaatatttcaatcattttagatcataaaaccttgatggaggctaccttgctctgaggtaagttccatccttgattatgaggacgtcccaaataacagcggaatatagtcttttagtcgctctagtcattatttgcatttttgtttctgccaaccattttagctgaaattttccaaccaaacttggtcacccttgcaagttgcaatatagtactataaaagagcatgcgagtatagtattgttagtacgaaataaagaaacttttattgaattgattaacgaactttacagcgtgattgctcatagcgggccttctcttccgctattatttacaagccactgcccaaaaatatatatcatgaaacacaaaagcctatcttagacgtggaagcaaagctcgataaactctcctgcggtggtaatgagcttcgcagtcaccattaggatttggggtacaagaaattttttggggtggtggtgtggtgtttagatgactgttccactaggaattaaagcatccttgattactgtgacaatcccactttttatgaaatacccatctgtttcccttgcagcttcttggacattgtcactgttaataatctgagaattggaaacaaaccatagattagatttaaaatatcccgtaacatgtcacatgaatgaaaacaaagtatggcaacacagtatgaaaaaaaaattgatatatttagtgagaaagccatttttatcccaatgaagaggaaatccaagtcatacaattgtatatgagtgatcattctcatgatcgagattaaaagttttttgaagatagattattacttaaaatattacatgattttattttattttttaaataaaacgcatgacttatatattttaatcttgatcattcatgataaaatctaagggtcaatatttattattttctcaattgatatgtccacacaaacatataggagacatatcaaatgaaaactattttttactgagaaatcagatctataaatttcaaccatacaactaaatataaatggtcaaaattaaaagttagtgtcacatgatcacttaaaaaaagtcttaattattgtatcattgtgagaaatgagaatatttaaccacaatcatcagataaatttaatgatttagattgcatatttaattacaaatcttacatgatctttaattaaatagaaagaaaatcacacaaattttataattaaatatgcaatcattacttaaattatcaattattgacataaccaacaacttgtcaatgaatgttaacatataaaagagatagtttcttaagtggttttgatactgaattaaaatttgacttcaataaccatcaaccttaactgtgtaggttattgaggtgaaactccaattttgattcacaaaacaataccaaaatcacctaagctactacgcctcacctgttgtcttgggaaaaattggcttagaatgtaaaacaaggaacaaaattgtatataatagaagatgttataaccttgacattttccccaattcgagcattcttgtcgataattgcccttttgatatgagagttcctgcctataccaattggaacactgcctttagcagccagaaacctcttatcagcctccgtctggaacacaacaatcagaaaaccaatgttgcagttagaacttctagtcaaactaaagccaatcgtattaatcttattcacatgcaattgcaaactcacaatcgataaattgaatatctaagtgtttcaaccactttgacatgtgaaactttgttggctattaaaacttggaaaaaactaggtgtaactgagcacaagttatttagccacattattacctcgtaataatctgcccccattaataacgtgtcttcaataattgcaccttctgatatgcaagatcgcagcccaaccacagaatggtgaattttgcagttctatggaacaaagtatggaatacaaggttagtttcctataaataaattattctcattatatttgacatctttgttaagaattgtataaatctcatgtatagagcagatcagtagaatgtgaaggttctgaaatgcttaccttaatcacacatccttcaccaataacactatcagtgacatcagcatcaagcatcttagagggaggcaaatatcgtggttgggtgtagattggagatgaacggtcatagaaactgtaaccaatataccaaaacgcatgaacacataaacatcagaaccacaaaacactatcattgaaatacatgtgtcaatatgatagatatatcaaatagcctatataatttacctgaagtcaggcacaggctttttggtgattcccagatttgcattatagaaagcctcgattgtaccaatgtcttcccagtagccatcatacaagtaagcttgcacctgtgaatgtacacaaacatgccgtacaatattctcaaaaaattgcatgctaaatttaccatgcaagaaaataacaggaaagtttttgtaatattaaataaccggaaggaacacatactctcattccaatagaagtagcaccaggaatcacttcactcccaaagtcatttgcaccaggaaacttctcacggagcaggtctaacatcacatttttgctaacaacatatatacccatgctagcaatataaggcatttcctttgctctctcgtcatcaagacccaaaattgtagtatcaacctagtaaagaaaaatgactggcatttttaagcaattgttcaggtaataatttccagataaataacaacatataatacatcttatacgggcttaccttcatggctttcaactgttctccttttggcttttcagcaaattcaattatacgcccctcttcatcaatcttcatcagaccaaatgcagtggcacgagcttcatccattggcaatgcagccacagtgatatcagcatcagtttccctatgcgcttggataaatttctcgtaatccattcgatacaaatggtcaccagccagaaccaagaattccaaaacattgtgctcttcaaaaagccacaaatactgcctcacggcatctgcagtaccctgcaatgatcacaccaagtttgttaaaacatcaaatcaagggacaacaaaagtcatcatcgcaaggtaccaaaatttagagtcaaggcagtgctgtcattacctggaaccaattaggattctcaggactctgctgagcagcaagaacctcaacaaatccctcatttttgtagccacccatgttgcttgcataagcacgagaaaggtgtcggtttaacgacgcagaattgaattgagtgagaacatagatcttgttgacattgctattcaagcagttgctaacaggaatatcaattagcctatagttagctccaagaggaacagctggctttgccctcttcttggtgagtggataaagccgagtcccagcaccacctccaagtataatgccaagcacactctataaaaattttaaattgcaatcagaatcagaaccagaaccaatccacatccaattcaaatatcacacgatcgaaattcaaactattgtgatctaaaaaaaaccctgtttacaatttgatccacaaatacaccctaataaacatatgattggggatttgaaatttctcagtaatttaatgttgtaacaatggaacaaatacagagacaaaaaaatgaagaaaggaggtaaacgtactctgctggcatcgggatcaaggcacgtttgtgagttttgggaatcagaaactgctttaggagtaacaatcactggattgcgacctctttttggtgccaatgaaactgaatctgtgggaatcttgtctccacaaagttgtgatgcagagaatgaaaggcggcgtggaacgctttttcttcccacatacgatgaaggggaagaagcagaacgtggaacattcagagaacctatagccgccatagatgccattactctgtgtgtgtgtgtgtgtgttgtgacttgttacttgtgagtgtctcagttgaaagaaacaaataagtgagtgtgtggttcagaattggtgtgtgacactgttaatatgcaaatggtgttagctattattatgagccgtatagtgtagatactattacataccttggttgatgattttttttaatttatttataaaaaaatctgtcgttgggggggaaaaaagtaaaaaacgacaaagcacattttcgtaggatagagatggaaaattggaaatgcaatgcaagtggaaggaacgaattataggtggtaagaccgaggggaagggatttcacagtttgaaccgttcttttattcgaaggagatgaaagggacaggctggcagggtgggtaatttcatgcttcaatgagcaccgttcagaatcttgcttgcctcacctctcatccccatgcatttgtcttggtctattctaaatctagttctaggagtaatattctaggtatatatcattctcaatttttaagattttcttctttcttggcttaatccatttcttttccaaccaacttaacttaattagggtacttgattattttattggatctcgagattctcatgagcttcgaactggttattataatattaatttttagttttaaacttccttatatttaaagttttttcctcttcctcaaaattgtatttttcaaaaattaaatctagatcttctttaacaaattcaatttgtgtttgtcaattcagctacattcattggttgggttaaaccaatttaatactactagaatatgccaataaataaatatacgtgggtagctacagtttactaagtaaaaccaattaaaatggggttgcttgcacttgaaaaggctcggtaattatatactgttttattttatttttcctcgttataagacaatgataaaaatgctggaccgactttgctacaaataaaagatacttcaaaatctcttttcataatcttttaattaaaatgaatttcgtattgctagaaattaatagaagaaaatgacataaaacaaacgcctcaaagttcagggcatctatttaactgatgctggatgagtggatgagtttgttgtattataattatccttagttttcttgtactttttcttaaaaaagtttcgtatgtagagtgaaacatgcagtgactaggttgcgttctcattttccacgggagcaattgtatgccacataggtatgacggcttcaatgaaaggaatggacctctctcacatacacgagctcaagcacggacttgaggggactagtgaaatttctcatttattttttctttttggtatttcgggtgttatgggtttggaactttggattggcaattcaatttgctttgctttctttaaaggccaccaatcatagtagggtggtaattattaaaaatgggtgccaaatttctttataaggtatcttgctcgtgaatgccatctgtgcattgattaaatcctttctttcaatacaattccatgttcaattcacctctgtagcgcctctagatggacgatttcatgaagttttcaagttaagggttggtcatcaattgtatgatacgaaaatcgttattatcgaacttttggaagcagaatggaggcatagctaacaaggggtgaaaacaatgacttctagtgaatctgtgatgctaagcttgagtctaactttatatcaattttctgacctaaaggagtagtttcacaaaagatatcattattagttttcttaaaaaattagaagaatgcgggacatattttcttactaaactgtgtaaattaagtttggtgaaagtttttatgtcaaaaaagtttcgtgaaagtattctcttgaatcagtgttcaatttgtaatgcttaagtacctaactcaaatagtccaatattactattgcatttcaaagggaaaagggttacgtatgggaaaagatgggcaataacaaggcccatgtatatttcattttattttataaaaaagatttttttttttttaactcaggaatatccttagtctaaaagtaaaagattaatccattaaaatattaagatagaacttcattaaataaacagtgagatttactaaaaattataatttctaatatttttcagttaaaaatagagaaaatgttagagataaaaactattaaagagagtgttgttaacatttttttatacaattgttattattagttaatttagtgtagcagtaactaagatgtatttttctttatgcattagtgaggtccctaattgattttttttacttatattaattttaaaaaggctccacctcagatttccttttaggcttggattaacttatcaaaataggagttgaggcaaccactttagttaatgaccaatatctaatatccaatagttgagaacttatacttgatacttaataactgacgattgatgacgggttatcgttgatttttgacggttagccgttgacgattgatagcttacggttaatagcaaacttagaattgttagaacaaagttaggatccattaaaattaggttagtgattcaatcaagtgttcaagaggcgcaaattgtttgaacgcacgtggaaagcaacaacatgacatggtcaaatcattcaaatgcacttcccaaaaaaatagaagtaggcattgaaagataactactactttttttcacatggatgggtaataagaagaaaacattagcgaaaaatgtttaaaaaaatgaaatgttttaaaaaaacattgggtaataataagaagataactaatattttatttatttttattcttttgtaagtttatatatttttatattttgatatatgtaagtatttcaagaattataaaaaaataaattaaaatattatacatatcgaaattttaaaaaaatacgaagttatcgaaattagaaataaacaaatattttactatgtatgagatgcttaattcttagcagaatataagtacatatatgaaaatttaaaaagtccgtatttataaatatcttaatttctaaaaataacaaataagtgcaaacaaagtccgtatttataagcaccaaatcacatgtgaaaagacaggttcttaattgttagattggagcatccattgtttgattagtttagcattattaactcactgaccccactctgtggtccacctcagctgccaccatcttttttcttattcttatgtttcctcttttctctttcgcacaaacgcgtacgtagcaataagcaatgaccagaaaggtgtcgaatttctccgatctaatccaaagggtcaccacctcctgcttcctccacccattcaccaatgacaggtctgacgccgacgacagggaagaggagtaccacagcggctcattaggaaacagacacgaagacgaagatgccagcgaagaaggttacttcggtaaagaaaaaatggtgatggatttgaaggtttcaagagaggaaaagaagttggagaagatgagggcgttaatggaggaggtgttcgaagcggtatcggcaatgaagagtgcgtacgtgagcttgcaggaagcacactgcccgtgggacccgcagagcttgagggaggctgacgtggcagtggtggcacagctgaagaagcttggtctgttgagggacaggttccatgggagtgtgagaagtgttgaagaaggcaagagtagaaggagaggaggagggcatgcaccctacgagacactcatgaaagagctgaagaaggaagtgaaggccaaggatttgcaacttcagaaacttaaagacaaagctcggaggcctcagccttacactaagacaaagcttgcttgcaatactcatattcaaggtaaaacaaattaatacgtcatagttcacttttcaaattaaaaactcagttacttccgatccacttacaaattgacatagctaggcggaaaatgattagatgggtcaattcatacaagacacatatatatagtcgagttttttttatatgtttataataaaaaatttaatacaagtcagttgtgtatcaaatgaagattgacacacacacacatatatatatatatatatactaatatacagagagagagagagagagaggaagggagaatcgtgtaatatttttttatggtgtactttcaataattaatgaagagcaatatactcattttaattagtagagtttcttaagtgatttatattattcttataatttatacaataacacttatttatttatttattatattttatatttttctcttttttttttcttaattgtaaaatttgttatacaatttattgtaaaaaaacatttttcttatgtgtatatatatattagaaaaaaaatgtgtttggttagccagaaaattcaattggtatatatgttaactttcttgttcaacgtctagaaaaaaaagaagaagagcatcttaattataccaattgcaaccttttgacattggtgtcatgaaatagcggcagggtttgtagcagcaccatccccagaactcttggaagcaacaatggcgcaagtaaaggaagcatcaaagtccttcacatctctactcttgtcgctcatgcacgacgcacaatgggacatggctgccgcagttcgttccatggaagcagcttctgccaccaccaccgacaaatactataataataataataatatttgttcagtaaccgccacctccaccacggtctcaactcttcatgccaagtacgcccttgaatcatacatctacaagaaaatgttccaaggattcgatcacgaaagtttctacatggataatagcaccctctcctccctcctcaaccctgctcagtttcgccacgattgcttcagccaatactgccacatgaagtccatggacccttatgagctccttggaggagttttaccaacgtgtaattttgggaaattctgctccaacaagtacctttccattgtgcaccccaagatggaggagtcactgtttggtgatttggagcagcacagtctagtctcagaagggaaccatccaaggactcagttttacaaagagtttttgggggtggcaaagggagtgtggttgcttcatctggttgcgttctcgtttgatcctgcgccaagtaagtttgaggcaagtggtggagctgagttccacccgcgttacatggagagtgtgctgaaatttgctggtgggagggtgcctcctggaaacattgttggtttctcagttagtcctggttttaagcttggaaatggctctgttgtaaaggctagagtttatttgatggctagaaactgaggttatatagagactttaagtgctgtgtttgaaagtcttcaaattaatgtttgcttaattagcaggacttacatgcaaagttgtgatatatactatatcgttttttaattaattcatgtttcttagaaataaatagtttatcaattatttgtagtattattttaaaattatttttcttatttttatctatttaattatttttttattaatgtttgaaaaaaaaataaggaagcaaagatatataaaaaaaataattactacatttaaaaactagaaaaaaatcttataattttttttataaaaaaagtcttagatttcataaccaacgaaggaagtataaccttattgaagtgattattacgatgaggttcattctcgaatatgttatctgacactggagctaatacctttccccgaatataaaagttaaataaattattagttcattatatattagttagccggacattttagtttttgatatgttaaaatctttttgttagttagttttacaatttgtcaaatatatatcattcatttcagtactcattaaatttatgcaaaatgattgtaaaattaattgaaataaatgttttttttcctcacaaaattaagaaccggtgaagaattataaaaatcacattgtagcttgatatatatatatatatatatatttgttgttagctcaaaatgacagtcaaaataatgatgaaaaataatttaaataaatgatttttttactaaatttataaataaacaatgaagaatttttaaaatctcattaattaaaatatttggcctatacaattttagtttaaggatttcctctctcacatgggccaacatatcccatcgcaatcaaacaacggccacccagtgtttcagctataacaaacaatcattacgagttttgttgacaatgtgccccacaacaaacgttggatgaatagaaagctactactaaatattgggcattttaagattcacgacaaacagaatcttttagtcaaactgtgaaattgaaaagttaattaatagatgttttaaaattactattcttttcgcaattcaatgttatcacagaagatcaaactcacaaaacagttaatgatacccttgtttttgttgttgttgttgtgattttctaggaaaaaagtgacatgaattatcaaaagtaaccaaagatgtaattttatgggaaatttcattattgttttcatcgattgttcatctaaagatgggatgggaccattctgcttctataatggatatataattttgaaacagtagatccacttgattcggtcgagaccaagatgaaaagcgaagttactgaagaggtttgctgcaatggtcatataaacgtgttaccgaatggtaattaatatatttagttacttgtcctaaacaaatgaaactatataggattcttattaagctatagtagtggatgtgttttgtgttttgtgtatatgtaatttttgtttttgttttaattatctattttccttagtattttaagtatgttatttgtgaggttttcccattagattgtgattctagattgatagttgatccagaagatgaaaataaaaatgaaataaaggtgtaacgtgcttaggtgggtaataagatgttaagtatttgtatcatttattattgtggtcgtattatcatttatgcaaaaagcttgatagatttgttgaaaataactcatttaaagtgagattgtgataaatatatgctcctgcataataattaaattatgaaattcttaactccattgatttttaattaatggttatcatttaatgtgaacttctcacgttagaggagatgaatcttatttgatattgtacaaatgaagaaagagtgcaaagattgattaaggatggaaggcttttgcaaattagcataatttgaaggttgtccacaaaattatatttgagttcccatatccaaatctaactttgctagctctattgtggattgattaattgtaatttaagtgcttcatactctatcaatctctctaaactttgtttaaaacttttttttagtgaaattttgcaaaaatgatagtactttgattttgtgaacttatgaactaaatatacatcattattttataaaatatattacatattccaatcttattacttttgtttctcatttactaagttttacacaatcataactaaatatataccattatattatatatttaattttgtaacttacccatgcggactgtactaatattaagctataagagtgttttttgcatgatgagacataagtgatggttctaaaatgaatgtcttgatttgtagcatttattattaagggattgtgatcatgatctcgtactttacagttacatgagtcttaacatgtgaaaggaagggttctgaagccatcaaaagcattaatatatggattgtgataagataattgagtttagagtaacgatacctaaatatttcattattttaaatattttttgcagactttttatttttctctttttattatatcataaatcctgttatatatatatatatatatatatatacacacatttttttctcctctctcggtgttaaataacataatgagtgtttatgtaatgttttccttgggtttaatagcattgaataaatgtgtttgctttatttgtttatgggcatctcttcccgcatcccaaaaaaatcacctagccaacacctcctttcattttggaaagggtgttttaacctttgtttatttgagcctaagtggtcataatgaggcccagaagaattttccccaagctaatgtgatggttcaattgacgtttattgttattgagctttaatagggtgggtaaagcccttggcataatctttcaagtttcaataatttctttactgctttgaaagtttcattctttgcaaatgtttagtttatattttttcccgtgcttattgttttcttcaaagctttttaaaaattacttttataattatcttaagaatcattcgaaatttacgagtaaactctcaatttagttcttgaataagataaacatggtcactgtagtccttaaatttactgaaacaagagataatcctctgtaacccatcattcaagtaggtcccctttttaagtctcgtttgttcacataccatcctatgtgacacgtctagtaggaatgtttaaatctaatcaaataagaaaaataaaaaaatcgatccaaaagaaacaaaagccaatgaaacagactatttcattttttttactatttatatttataatagattgatttgaataagtttttggttagtgtttttaaaatcgaatcaatccacacttaattgatatttttaggactcgtgtattttatagcacactaatttaacattttttttgttatcaaataacaaatgacgaccaatgacaaatattgaagggaagggggtagggagtgcgaacgggagagaagagaaacgggtgagagggaatggagggtgtgaagggacataactacacaagtaatataggaaattcaataaaaaaaaaagtgagagtgaagataaaaaaatatcgcattgatacatttaaatcagtttgttactattgtttttaattaaaaatttccattgttatcattgaaaaatatcatgtaatccccaaaaatgaaaagtcctgctagtatttcatagcatcaatttggctgcacaacttaacagggacagagattgaattcacattaactaaacaaaatattcattgattaaaaattagaaaaataatattacaaattccaagacttaagatatacacttgtatgtttccaatcatccttgtcaaatggattgtctattcaataaatattgttaacttgatattatatataagatatcatgttgatgatttattgtccaacttaattacattttttgtttcttatgatattgtagtcgtgaggcattaaaattaaaagtgcaagttatcatgcatgatccaatgcaatgttaacaaaattgtaaaatatttaaataaatgtagtttgttttacaaaactaaatataattagaaggactaaaactgcacaattaagataattgaaagccatatttgtgcaattggaacacaagattaaaatcacatttaggaaatcaaagatacaattaagtaaaaaaaaattgatggtaatgacgggaattgaagtgacagaaaaatcccgcggagtggcctcagaatgttgcactacattaaagtataaataaactcgtcctattgttgcttgaaaatagaaattaacaagaaaggaagaaagaagatggtggaagctcgcatgcaaggttcagtcctaaagaacatggttgaggccataagagagatgaaggtgaacgatacaaacttcaatttctcccagatcggcttctccatgcaagccatagatcccacccgcatggaagtggtggatatcttcctccaatccgatgcattcaagaactactgctgcgaccgcaccatctccatcggcgtcaacctcaacaacatggccaagatcctgcgttccgccgccgacgatgacaccatcaccatcaaagccgactatggcatccacttcgccaacttcatcatcgaaagccctagtacgtttgttttccttctctctcttgttagtttaagatttatgcatttccctttacttgatgaatgaaaagatagaacgtaagctagggctgttctaaagattcgtgtgttgttgttgtgtgttatagcgcgagccaagatatctcattttatgatgaatctggtggatatagacaccaagcccgaatgcgtttttcccgaggagctgatttacgatgcctatgttaagatgccttcagctgagttttcaagaatttgcactgacctctctatttttggggacaccggtaattcgttcctatatatatttttctcttttgcatgcatgcataatgcattactttacgttcatcattttattttgcatgcatgtttctaattcttgctgcttcttcattctttaattaattgactttgcaattaattaattttttcatatgtgttgctgtattttagtttccattatggttaacgaagagagtgtggggtttagcagcaaaggagatattgggacttcaattatagtccgcaggaacaatacttccatccacaaggtaacatgttcactagcaccaaattctttcatgagcgttaacgtaacaataagtaatttgggcttatattactctctgtgagattagaatgtgtgtatttgtttatgcaattaatgcatacaggctgatgaggaagctactgtgatagagattattcagactgtgagcttgaattttggattgacatttttgaactgtttcaccaaggcaacgccgttgtctaatacagtcactatctttatgtcgaaccagctgcatctgcctgttgtggttcattacccgattggtgagaagggttatcttcgcttttgcttgaaccaaattaaaccttaatattaggtgctcttatggattttaaattcggttgtaggaagatattttgtgggttaacgaatatggtactcttttacgttttgtgtagttgcattcctttccctgaccacgttattttgcacattattggatgtatattttgtaaaaatacacaacatgactgtgtttgctggtgttgatgtagcatattgtgtagttaacaggaatcgagctttgatgttgggactgctttactttgtgctttcatgtcctttgtggtaggaaaaagagtatatatgtaaagcacttttcagttttagtttataagtgcttttccacttaccgccaaacagagtaatcataatcataaataatatctaactaatggtacgtttgtttcgtaagaatttggacggatggatggaaagggcaccagattgtcaacttcaagttttagtgttttacaattgttgtcacttttgaattgtgcaaaatagtggaagataaaagaaatctaagtgaaacccacctttaaaaacaaatttctatacttgagcagagaagtggaaaagtaacgttttgtttatacatttatcaaattgcccttattttataatatttttttaagaatatttatatcattttatgttcatgggattttaaggatttttttcatagatattcaaaatcatagtcaaaatttacacgcagaagaatatgtgcaattcacctactgtttcattcattctccttatgtgatgatttataacagtgttaaagaaatcaattactttatagatatgatattatgattgcagtgtgcaggaggggaaaggttagaaactgttaaaaggagaaggttataggaagtatttgagagaaatgaaggagacaatatatgaaagaaaattaatttttattatatgagaaatgtttttgttttgaattagtttacaaatgataatttccttgctttttatatgcttcaagagaaaaatctaaaaatatcaagaaaaaaattcacacacttcaagaaagaattctattcattttttcaaattatttatttatacacacttttttcaattatttattaaatattatttttatttatctctacatttttttaaaattttctttagaatagtaacacaaatttaaataaacctaacacttgattttaatggactaaattaaatttatattattcaacagaaatttgtaccaagcccaactccccaaacgaaattagaaataacacaaaatcacaaagcaatggaaataggggtgtgtgaaataaaaactcacaagccactgggaagcaatggaagtcgagagccaaatctcacatcagagataaagcgaaaaatagataagaaggcacatgcaatagatctgtatttctagtttcttaggacatgtttgtattttattaactttccgttcgcacaaattacaaagtgtgattttaatttgtgagaaataacaatttattatttttgtctgaacgaccgctcaaacattaaaacaaacatatatttaatatttgatattttattttaaataataattgtagtcttattcttttttcctcctaaagcagtgtccaacccgtgtccgaatcacaatttttttttttttaatttgatactgtaattgagtattcgaattactttatcacaacatttgtaaatcaaaattgatcatttaaaaaatatagatactaaattgtcaataaatatataattattttttatgactgttgatattaatgtaaaatatccattaattttatttaagaaaatcgaatccaaaattatttagatcaacaacttattaataattctgaactaaatataaagtatatctaaaacaaataacaaacccacagtgtagtttgttaattattgcaaaggttataaaaactgaccgtgtagtgaagaaataactttaaaaagtataactagtagctcaagggtgatgatattttaataaccttttatttttaacacttgaccaataattttttattttattttatttctttcatcctattacatcgcattatttatcgtatcaatctttctcttgtaagaaaaacttttttcaaaatgaaacttaatgtttgaaacctatatggacttccataaagttcacggttccaaagtgttcgtacaaaaattttaagaatgaagaaaaatgctacacaatagaaggggaggagcgccgaggttgctgatagtgatagctattcaatcccttggtttgcaattacattggtgtgcggttttgattctgaaaacggtgattttaccaatctggctttgccatgcatgttagatgggttgggtaatgggtgtcattactcttcaacaaccacaagataggttgtagataacacgcaactagaacaaaatcattactctctatgatctcacatgaacatatagaaactagaacaaaatcatctatgaacataaatgtcctgatctagttacatccataaagatcgagatgaaagagagaagtgcaatcaacaacattcgtaacataaacatgttttaagtttctgtaaatataattatgtataattctaaatttttttgttactttggtgttccttacattttcttagtaatctattttagtccttaccatttactaaatttaacttaatgctaaaaatgaaaaagtgttggcacatctagtttggtaattaatatttaggatacaaaagctgttcatcggtgaagaaaggacttaaaaaaggtataattattagatgaagttgataatgggatgtaaggtttgcacgtttaccaacttccataaatttcagggtactatctcatggccttctgcactgtgttatgctaagagaacgaaagtagcgagttaatccttattattggagttttttttttttttacaaaatgtatagataatattgggagaaaaaaaattaaaaacattaatgcgaggaaccaaatagcctccctttctctattgctcataacatatcaatttaaattagaaaggcacaagaaagtaataagtatagaataaaagaaaaaaaacaaatgttaacctgcgtctttttgttaagaaattagaaggagaaatcttttttttttttttttttactttaattacttatgatgtttgtctttatcggacaattaagtccaatttaaaaagtaaagaaagcattgtgattctcgcttgctgtgatgaaaaccaaatacaaaaaagtgttgccacgatctagtttggtaattatttcaaaggatacttagtagatcaagttgataatgggacgtaacgtttgcaagtttatcgacttccataaatttcagggtattaatctcttggccttctgcactctgttatgctaaaagagaacaaaaataccgagttaatccttattgaaaaaatattacaaaatgtctagataatattgggagagaaaaaaaatgaaaacattaatgcgaggaaaccaaatagcctccctttctccattgctcatcacatatcaatttaaattataaaggcacacgaaagtaataagtatagaataaataaataaaaaaggtaaaattgataaaatctatctaatgatatgtcaggtctgtaaaaggaggtgcgctggaacataagcaatgcaaagaattggataactataatcaatatcacttgcccggaacaattttaacttcagcattgaattagtgctagtttttatcccctataacaatatagacaaataaacaggccgcactatcttgtacagatcgttgaatactcgttgaaacattctccagagcccaatagcacaaaacgatcaaagttgaagtaatggcaatagaacatcagcagttgatgaatatggtacagggatgaacttcaaccacacgtatcaaacttaaataagaaaagcatatctcaaagaacaatatgaaaaaaaaaaaaaaaaatcattcttattgcctccaatcttcactggcataaactgcttgatctccgagctcctcctcaatccgaagtaactatcaaaattcagatggtaactgttatgcttttccttcgtttcactttataaacgagaatagaatacatacacgacaaatatcaacttcatctctacatgagactcacagctattgcttttaatatgcatgttattattaaaagaatcatatacagatattgccatcaagccacatagggtgagaagcctaaagaggaataacatctacagactcaggtactagtacgactgctattaaaacaagacagaacaaattagcatatttacaaactttaatgaacaaaattacaggttataaaatcatcacttaaacactactgatatcacaaatatacaacctatcatagaaaactgccaccaccttcccatgggagaggaattggtgagttgacaaaataagtttggtaaataattttttttgaagtattcaagaatcatgaccataatgcatgcagtaaaaccatcagcataaaaatcagaaagagacctggttgtacttttctagccgctctcctctgcaaggagcgcctgctttaattacaccagaagcaaggccaacagataaatcagcaatgaaagagtctatagtttctccacatctatgagacgttaccaccccccaatgcgcttcctttgccagcttcaccacttcaatgacctccgtaacagttccaacttggttgacctagattacaatggtaaatcaccacattttcagtgtattttcttcaataaaacagaagaaaaagtacagaggaggatatttaaaataccctcccaaatgatttataaaaataaataaaaagtggcaaaactaaattacaggcaagctatgtttagatttctttttcttttacataaactagctttgtaatttacgatcttgtatttgcatgaaaaagatatttgtggatatccaacacctcaacttagatctgaaacaagattgcttccagtccatgaacaactaagtttactatttattattaaaaaacaataatataaaaaaataaaaacatgataagattaaattttgtcattaggcaaaacagacacttgaaagttaattgaagaaacagcaagttaccttaagaagaagggcattacatgcagactcagttattgctctctcaatgcgttttgcatttgacatcaagagatcatccccaactacctgcagaaccattcaaaatgaagggaaactgtaaaaacagaagttccaatcagtagccaatatataaacttaacatctcggtggtaatatgcaaatgacctttctaacgctcacaaccccaataatgtgacaaaagacaaaacaattttatatgatattgtttttcctcccttgttcacatagcctgctaatgagtcaatatggcattgatacactaacaatcagttggttattattttctattaaaaatatccattgctatcattaaaaaatatcatgtaatctccaaaatgataaggtatacttcatagcatccatctttggctgcacaagttaaccaggacagagattgaattcacattaactcaaacaaaatattaattgattaaaaaataatacctgacaaatcccaagacttgagatatgcttgatatgttcccaatcttccctgtcaaatggatcttctattgacacaatagggtattctacaaattcaaaaagaaaaatccaaaataaagacaaagcataggctaaataatttataatgtcccccatcaggaaaatactaagataaaatggtttaccagagcatagttccttgaacaactctatcatatcctctgctgacttaaaattctgtccagacttttgaggagattggaagtccagatcatatcttttacctatatcagggaaaaagcacatacacaacagtagaaactggttaaaattattcaaaggcaaaaggtgcccaaaaagtacaagggggttttaacagcatgaggtgaggcagggtgcatcacagaaaaaggcgttaggggctgttagcaacttagcattagaaaaagaagaaaccaatcaacagtgaaatattataatattttgcagcaactttccatataaattaattatctagtattaatattaaaaataaaacattaaaatgataaattatgacaataagttgataacaagctctacagattaaagttcataacagtcactcatcatgctcatcctattggcttttaaaaatctaaccctagattcagaaacaaagctgaaatgacacccctaaatagaatataaagatgacatattaccatggccaaggatggtcatttgtatttatagtcattattgaagtactattatcaaataagagtactatttttgtatctcttagaaagactagttttattttgctatgaaagcaaaggataattaatggttcatatttttcataaatgacgcagtaaaacagttagcatagcactgctgcaacaaagactctcattacaatagctataagcaaaatagtagagcaagaatcaccaaattccatcttcttgagaatctaaaagtacacaagcgagagaaacttagaaatacctatgcaaaaatttgtagcagcaacatcaagagctatctttattttctcattataaccagttctgctaatggcctccttcacaagatccagggcttctctaaagctgatgatacttaaacagtcagctaataggtagaagtaaaatcaaaatgcttaatataacaaaagatttctttgagtggaaaaatacttaatgtaacaacattagccaagtgcaaatttcataaatattaagtgattttatattttaaaaactatagtagtttggtattaaatctttagttgcttaaaaatttagataattagcttcaaataacattaacaataagcaaaagcaagtacataaaattaatacaaccaaccctttatattaaatttgataatatattctcttgaaagttaacttaatctattaatctactctctcttcttttcatttacaacccatattctttggaattaattcttcatatcatgcttataacttcatcttagattctagttttatatttcacctgaattttaaaatattcatgcgcataggacactagctggttttattaatctttaaaaaaagatgtaatcataattcataacatgcatttaccatgtagaagaaaacatggtaattataacatgcagcagttcaaaatgttggctaaaagaaagtgcaagttagattaagaggcaaaatacaaatgaaattctttccatcacatatttatcatagatttcaaaggaacagggatatcatatcaatgtatccaagaaatcacaacagacagtaagagaaattacagcagtaaaaccagtagtttggagatattttttgtttttctttcctttcttctaaaatggagacattttaccccttttatattattcatttaacagtgaagaattttacagaaatttgtggtgcagtggttccatgtaattgaccccacaaagtggaaaaaggctttgttattgtatttaacagtaaagaattttcaaaagctgtagaaatccaataaaaagcttgcctggagatattaggagcaaagccaccatcttcaccaacattacagttatgtgcaccatatttttctgtaatgacagcctgcccttttgtcatcaacaataattaaatgtatcagcttaaacacgatatcagcaagtgattattaggattttttaatccatcattgatcaaaaaacatatatatgggctgggaaacaacagattggattgtcaaatcaattaaaaccaaataccaccatcgtaggaacagtaagcaacaacaaaggaagactatagtagtaataacataggatctaccgatctaaatcattgtaagccaggtaaacgacaatgtaaccaaactcaatgcaactaaacttgatatgtttctagtttgggaacattgcaatgagtgaaattatgaggagaaaaaaagtccctaaagacagaaagtaaaagcaataggattggataaaaaaagaagaaataaagcaaaaccacctttaagtgatgataggtctcagtgcccattcgcaatgcttcctcaaatttgcttgctccaattgggagaatcatgatttcctaataggaattatgtaagaaagatttcataattaaaagagtctaaataactatgaagcagaagaaacacagattaaaaagaaactatatctgtttatgtttgctcaaaaaataaagaacagaatcaaacacaacaataaattgccaaagttatgccataaataattgaacaggtgttagttacaacaaaaataattgaacattagtcatttaatttcactgttcattagtttctttggaggaaaggaacacatccctaatggaggtaagattatgaaaacacaaatgagaatgtctaagaaattaaacttcaacagaaattatacctgaatggccagattactcccagcatgttttccaccacttatgacagtaaaggcaggaacaggaagtgttgggctggtttttccagacaggtcagcaatatgcttgtaaagtggaacctgtatgtttttgtctttattttcatgatatcatgactgaacatatatactaattttccagattaaaagttaaacaaacttataaaaatattaattgttagagagtcatgcctccttttctgcagcaccagctttacaagcagcaatggacacagctaatatagcattggctccaagttccccctgcagagaaaatcagaaacagaacagataatatatatatatatatataatcttacaaaaattgggagacctatattgctaagatgaattattcaacaagcatgcactagtatctgatcgcaacaagtgtatgatataagaatcaatgacacacactgccttcatcaagcaaccattcaaaactgaaaaggaaactaagtatgcacatactaagtgaagtgcaaataatgcttccaaaatatcttgtatgaatttatcatatttccaacagccaaacaaattctcctactagcctaagggagcactttgtaaaagaaatggaaaatgaagagagagaaaatagaaaagtgaaaatatatggagatgcagaaggaaaactacgaccttcaccacttagagttgtttccgaatagcaacctagcaagcactatcccaattgtatccatcacataactaagaaaaactaaaagttatgtatcctggactaatgaaaaagacagtaaaaccatactattaagactattaaaccttttcatagcatttttcctaatcactaaccaaattcattttgaaatgtaaaataatcaaagcatagaacacaacaatatgtaatacggtaaatcaacagccaattgattgaattcatagcagagagagcgagacgttaaattaccttcttctcagttttgtcaaggtcaatcatggcctgatcaatctgcgactgaagcgtaggatccataccaatcaacgcctcagatattttgtcattgatatttttaacagctttagccacgccatttccgagatacactcctttgtcgccgtcgcgtaactcaacagcttcatacctgaatcgaatcaataacaaaccaaatcgataattgaacgagagcgattgataaataaataataataataaaaggcttacatgctggtggagttgccgctgggaacggaagcgcggaacacgcctttgttagtgtgcaaatcgacttcgacggttggaattcctctgctatcgaggatctgcctcgccttaattttcgttatgaccgattgcactgcttttctcatgtgattcgactgcggtcaccgaaaaaacgcatgctgagaaattccgatgagagaaacgggaaaaaaatgaaaagagatgatgagaggtagagagatacgatgaagagaacgggatcggaggttttggccctaacggcggcattgacggcatcttcgagttttcgggaaagcatgtgcttgtccaggtaatcttgcactgacatctccacaatcagctgcgtcttcttctactctccaaattctcactcacagctgagaagatgtgcgtgcccttgctttcttcttctgctgggaaaacgagattcaacactgatgctgctgcttcgtcttcctagtgtggcagagactagaaaaccgttcttgttaaacgtcgtcgtatcattgtataaacaaatcgagtttacttttaaattttgtttatttcctttattccactaaaatataattcaaatggcaaaaaattaaaaataatacaattaaataaaataatttggcaaatggtgcaaatggaaaaatatttgggaatctggggtactcaaacacgcccaaaatagggcgggtttaacccgccctattttgggcgtgtttcaccagatgttgacacgtggtagtcatgcagacggggtatggtgtgatcgcaaatttcggaaggtcataacttttgactgggatgtccgattgagacaaaatcggtggccacgcgctcgaaattgagagaagaagccctggtcaattcctaaagtgaacttgcccaaaaaattttcccaaaagaggcctctaagtgcctcaaaattgcgatttaattgttgaagctacaaaaaatttcgtgttttctaattttttatctattcaattagtgaattgcaatctattatttatttatctaactatttctcttaatttcgagcattctaacataaaatacgtcatcatcggacattgctacgagaaattacaactgttcaaagttatatgcatcgtcgatattatagtctaattttgttcaattttttaaattatttttgcgaccacaacaacatattttttaggatttatggtttagggtttcgggtttaggatttaggacttagggcttatgctttagggtttagtggtttagtgtttagggttaattaatccaaagccctaaaccactaaaccctaaaccactaaacccgaaaccattaaaaatctacagtaagaaccttgacatacattgtttcaacttatgccaagtccatcatcatatacataaagaagaagcaaaacagaaccatcaatagttaatcattaacccaaagccctaaacccctaacactaaaaccattaacactaaccaattatccaaacacactatctcttagccctaaacacataaaccttatccctctaaaccattaacctaatccaacagttaatcattacccaaagccctaaacccctaaaccgaacccactaaaccctaaacaattaaccaaatccaacagttaattaacccacaaccctaaacaaatgcataaatttccaaaattatactgtaaaatggatgatgcatataactttgaacagtcgtaatttctcgtaacaatgtccgatgatgacgtattttatgtcagaatgctcaaaattaaaagaagtaattagataaataaagaatagattgcaattcactaattgaatagataaaaaaattagaaaataggaaattttttgtagcttcgacaattaaatcgcaattttgaggcacttagaggcctcttttgggaaaaaatttgggcaagttcactttgggaattgcctagggcttctcctctcaatttcgagcgcgtggccaccgattttgtctcaatcggacatcccagtcaaaagttatggccttccgaagtttgcgatcacaccgtaccccgtctgcatggctgccacgtgtcaacatctggtgaaacacgcccaaaatagggcgggtttaaacccgccctattttgggcgtgtttgagtaccccagattcccaattattttcccatttgcaccatttctcaaatttttttatttaattgtattatttgtaattttttgcctaattcaaatatataaagaataaattgtgatatataaaaagttagtttacatttataataattaccttcaaattatatctactcgtcatggtttttaattgatttcaatataaaaaactttaagctaataaagtatagaaattaaactctacctttaataaggataattctaaatattatgctgttaaaaaaaattgatactaaaagcctttaaaaaaaacacaaaagtgcatcatttttcacaaaattaaccgatttataatatgaaaacttgtttagttcaagaccattatgtggtagcgatcttaagcaatttccatatggtgtataattgagtttttttagtttacaccaaaaaaaataataaaattcaattatatgtgtcgcgtgaagtttgaccaagatcatgacggtccgaaattatataataactactaaaaaagatgagtttaagaactccttataaaaaactttcatgtatcaccaattaaagatgggagtgattaacaatgttataagagcaattgtaagccacaaatgactaactactctgatcaattattatgttcacccaaatggaaatataaggaaattggctagttgcagagaatttctaggagaggagaaaaagaatagtgaataacaaatgatatccggtggaatcatccttgatttaatttagtgtattgtgccacagtttagtacaataaaccacaatatagtagaaacagtgttcgaaccattaaacatgtataatcaatcagtatgcccccctttactatgcaactacaaatgcactagatgaacctgtaaagtgatgaattgaacctaacaagcccttggcagccccaaaatgtttgattctgtatacaccaggagttacatcctgtgggattctccattctatggtagctttactttgagaactgagtttgaaaggcctagaccacttgaagcgcaggcagaaatcatcatcatcaaaagcaggaacccaagtatcctttccttggagaaattccaccagggaaaatgtaccttcagtcataaggtcattgcgagggcacgcagaccagaaagtaacagacaccatgtcacctctcttaaaggttgagttcttgggaacatcagagctacaatccccaaactttacaccaataggggttgcatccatcacaaccggtgttaataagcttatttgcttatcaaggaggtcagggggttgtggacctggttctacaggctggccactgatgagagcacgcgcaagcttcgtaaactcctgaatgtaagcactcagtgtgtgtggaccgtacagcgtggacgcaccctggtaacatgaaaattgaagttaaataaagcagcatataatggttacatctcttgccaatatgaagttatgttatttgatgataagttgcatccctaaaaatgtaaatttccactaatgttgcatttactcttgctatagcaatctaaaaaggtttgctgcatgcttcatgtctctttccacaagagttgtaactgacctcatatctctgcacctggtactcttcgtatgtggtcacatactgtgaataactattagtcaaccccgcaataacaacatgaatgttgctaccaaagcctttgctaccacttagcactgtcttcactgcatcacgaagacgcctcccagccattgttgtaaattctgtcagaagtaaaacaattacaggaagcatgaagcacccaaagaaatacataggccagattagattgtctcacaattcacaaatactggtataaaaatataaatatagatctgcaaggaaaaaaaaaaccatatataatataatagcacaacatattaagcaacacatttggattttggattatatcggatcttaaaacatttagacacacaaaaataaatagtgagagactcgcataactaagatgcagccatcctttggattgaacccagtattgctggaatagacatcatcaaaatatcatgatcccaataacggttcaacatttttttttcttctttgactcaatatattctcattcgaccaaggttgttgatgttgaaacttaaatgtttcaaaatgcaaaggatagaaattccaacaataacatcattttaagaaattaaaaataagagctcatacctcctggtacactgagaataacaagctgcccaactcggaggatctggataggaagtattgaaggctgcaattgaacatgagcaaataaaggttcaaattagtaaaagttatcaaaaatcagactctttgtttcagcagggagagcatttccaatcagggccaaatgaagaaatatttcctttgaaaaaagatgccttgtgatggtagcatatctttatggcagaaatgggtgaagagaaacatgaaactaccatcatcaaagaacatcaaatgagtaacttactgcccaatcatatggtaacttcatttcgccagtatcaagcaaaatgggctttgggcggtgacagtctatttgttccttgcctggcgttttaagtaagttacggaccagcttccagaaaggatttccctgacatacaattagaaataataatcatagagtttcaaagatatttaagaatacaaggccaggataataggtaagcataaggtcttatcagtggttacctgatcatcaccttgcttaaagtcaaaagctccaggtccatctgttgttccagcagcaaatgcaaatcccattgcagcagggcatgtctttacaacctcagaagctcctactttagaaggatttacctcaagctgggagaaatctatgaaagcatgtcgaaaatcaaccttccctttaatctgttcagatgctccgttgaatagctccactgcttttttaaattgtctctcccctataatacgtgtgctttcaaattcatctggataactgcaacatcagtttataggagacactttagcaaccataaaggattaggaaaattgtagaaaaacaaagaaacattgagcatgcaataaaaattacccaggtcctcggccatagcataattcattctttcctccacatgtactatgattgaagtcacaaggtagtccagtgtctatacaaaaagctccgagtacatttggactaacatcaccgcaatttgtttgacaaaatgcagaaacaaatctaggcttgtcaacctgcctaaggacacctctcacacgtctagcaacgcttgaagttttggttgcaggtttaccaggaggagattggaatgaggcagcaagttccagtaattcatggtctggaccaataaatttaagtggggttagaaacgtattcatttattaattattattatcatcatcatatattcacctaattgataaactatttatgccacatatataaagcaagatatcattcatgtatgtttcattagttttctcaatcagtcatttagggtatttacatcttgtcttgttcgtagacaactccattaactccaccaatattaggacttatatgagaagacttgtaaaactcagaagcaccggatcagagctcagaatacatgtaactaactacaagaggcaatccagcacgttgccaaagtacaaattttcctcttgttgtttggtgattgctctttctctttggactgttttaaggcttgttgattttctacagcaactatttctctgtaaggataatctaatatattctaaaatatgattagaaatttttatacattctaatttctaacacaaaaggggggaaatcctttggtcaaaccacatttgaagcctttaccctgcaaggcaaaaacattctagaacagtggacccacatcacgtggcatataaacctataaattctgaagctatgtaatgaacatactgtaatggaaaagaagctacttagtttatcaatggatgcattgtagccaaaagcaaacatcttacgattatcatgaaggctgggaattatgtttgaaattcttcgggggattccatcattttcaaatccaaccgaatctattcttacagacccttttcgctcaaaccagtcttccataaatcgtgcagctgcacccttattatccccgctaattaatgagtttgttcggctcattgaagtaccatgagtagcaaaccaattgaaacttcccaaaggaccccattcatcatcaacaaactttaacagagtcatttctttatcaacatcatacttaaatttgcttctctctgcagcaggattgttgagataagcactaggactgcgatttacaccagcatctaagagctctcctgcaagttgaagataatttatctcaaaccatgcgatataatcaacaaagagagggagaaatgacataatagttaaaccatatgactaccaactagtgcacttactagaaatcacattgatagcttcaaaataatactactaaacaaattcttaatacagttaatgatgtcaggaaaagtaaagatgggaaaaccctacatcctataagaaaaagctcaggcttgcctcattcatttatttctagacagttggtgcaacttgcttcttgcagtttttcatctttttctgacatgcttcaacagtatgcaaaactaccataattataataatttacacataacatttaaattatccacctgtgctcacatctgtatacaaatataagtacccaagggagaaaggacaaagaaggaatgacaagtctttcccttacccttattgacaaatattgatcctgggcggagattttcatgggcctgaacaatggttttctcaatgccatcaacaatgacatcaaatgactggcgaacaaatccaagagatgtcacaatatacacaacatactggagataacccccaggaccagcatgagtgtgaattccactaatagccacattcttttcagtatataggtcaccatatctgtcaaacaaaataaagtacaaaatcaggcacaaaacttagggatcaaacaaattaaatggaaacatcagccgcttttcacgctagagaacacaatcgccggagaatcctaaagctcaatatgaactcaagaaaccctggtgagactctaccaatcataccctagtgtgacctgggttagtcatgcctatataacaagtgtgtcctcccacggttcctgcttttttttctggagggtggagtgaatggtgccttagtcacgcgtgaggaggatctagacctttattatattcggccttaagatctgagaggtccgttgactccgaaagccttaggacccctccatagtaaatgctcggacttactagtgtaggtcagccatctgtgacctacttactcggccgaatggtccatagtccctcaagcttctagcctgaaaggcataggcagttatttggtcaactatgcctcggcagcttattcggtcgggtggtccagctgccactcacagaaatataagaaaatctcccatataattaatcttccataatttctacaagttattatcataatagttatttcttgagagcaaagaagtcattattgataccttgctttcagcctctcaattactttgatgactacaagctgtgaagccatgcaagcgtcgaggttcacaaacactacccggttaccctttggctgagcaacaatgaaagcccgagcccgcagcctgaagtgaaccccagatgcaatttgctcagtgttggcataccccatcatgttaacatcagctgcaggaccggtaatgtcatagcttcccataccaatcaaggaatcagaagccgattgcacaacatcactcttcagaagtagcaggaacaagaaaagggtccaaactcgcatagtaggggaagggaactccatgacacccaaattcagagaaaaaacaagaccagttttctttttttaaaaactcggccagttcttctcatctcccttcacaaatcacacccacaaaacttgcagttattacaaaaaaacgaacaacaaaatagaaatgaaagaacttccaaagcaagcaattccaaatttgcaatcagtcatagctagaatataaaaaaatatggttcaacatagaaaagcgtaggaagcaataaagggcaatttagtttctcaccactcagatgaaaagctgggaatgatgacatgagcatgtcgaagtaatctaagttatctgtggattgcagagaggctgccccaataaatgaaaagggaagaaaagccaattgagagagagagagagagagagagagagaagaggcagtgtccaacggagagaaaggaaaggaaattggactggttggtagagacgtagagtggaggaactggcacgggaagacacggacgtgcagtaaggggtcatccaccctcctatttgaaggttcctactttggattgcatggaaaataatttttttcatgctatatgaacttcattcgtctgaaagtgtgacaaatttgtgtgggagatattgaacacatacacaaattatatatttttctcttaatataatttatttttaatcaaagatcaataagaattcaaataaatattaatcatttaattaaaagatataaatcattaacacttacttatgtgtgctgttttggttaatattataaatattactgatatagagtaatatgtaaaaggaaaaaaaactaataatatacattagtttatttttctttataataactatatatcaaaaatgaaaactattatgcatgcttattaaactctttcaaaatcaccacttatcaattttgagctaagtaatacaaaattgttaaataaacaatagtttacattattttcttattttattgtttaagataatgtacatatattaagaaattaatttattatattaattttataataaaataattctatctaattaaaacaccattatttcttaaattattaaattccttatataattgtagttatacttttactagtctatttattttttaagagtgttatgaagaatgtgtccaccttaaaccttaagtcattagtgttacttgcatcaaagtaacactaacttgaagataattgttatgagaattatttcaaccatactattttagatggcatgtgaaataaatgagcacaattataagttgactaaataataaatttaaaaaatatttaggcatgtgactacacttgcgctaaagatgtctatatataaatatatccttgcacaaataagagtattcactccttttcatttattttcctgcaagtatttctgacttgattattagagtccatgtgggagaaatcaccttagatgtgaaaccttcacaaagattccagctctatcctgcatcacaacaaagtgttattataaaacaaataattaatatattttttaaaaaagtgataaataaaaataaaatgagatagatatattaatgaatttgacacactatatgaacacaagtagatctaaattaagtggatcacatatttgcagttagcctataagtaaacgaaagtgttgaaaatttgagggataagaatcatgttcacatgggctaaaaataatgctttgaagtaggcgcagaaaattagtgggaactggtatgatgaattattttgactaaatattgttgccagttgccacatggagtaatggagacatggagttcgatcttggatcttgaagttcctaatattaattctgtctccacttatctgggtttctttttttatctttctccattgaatgggatcaacaactttctataatgatataaaggaaaataaaatatgtttacggttcatgtgatcgattgataataatgcgttggatatagtagctagacatttaataccaaatatgtttttttagaatttaatcaagataacttcggtattttttaattgtgagtgtaaattgtgtagtaggagataaccttttttatctttcaaaagtactattctcattggtggaggcaaaattaaagtttgtgtagttatatttcattaaataaaacaacacttaggtgttcgaacttaaataacgataaaaattgaaagagaccataagaaaattcttcccgaatcaattagtaagcttgtgatatgtggacagattcattggtttgaatctgaatgtgaatcaacaaagtatatgttggagaaataaacgctttataaataaagctcaaaagaaaaaatgatgaaatacttcgaagttttcttactctgttttaagtctaaaatattttatgtttctttggaagtaattttaaaaataattaaatatatttaatttttttagttcaaatatttgagacattggatagtatttttttttcaaaattgttttatgcaaacagtgttcatgtattcaatgttttgatacatcaaacaaatataaaaattattcaatatttatttaaaaataattaacaatattttctaaatatatttaatattatttaattaatattttaaagaaatttgttaaagatattttcttaagatatgtactccatactttaggcaatcaggaatgacagattctggccttggaaaacattccaacggatgcgtggaagtcaaggcattcacacaacacttggagagatccaaacaaaatccaaatatgctccattaagagtaaactagaaggatcatcgaagctgtcgtggcccatttcctttaactttttcattatattttcttttgtccttttcgaagaagaaacaacttcttttcacattcaaaattcaatagtggactccaatcataggataacattaaatatatacaccagcactaaattctttcatgtgcgttacaaaatatctataaacacgcgaaattgataaaaaaaaaaacccaaaactgcttaaactgaaaattacaaaaaaaaaaaataaaaaccgtatacttttagtggcttggtttgattttttgatcttgtcattaaaatctaaccaaataacacattacaattatattatttcattgaatggatgtttaatattatgtagacagtttttcaattttaattattatagtatgttatttatagtgtatttttttctataataagtttataatatatatatatatatttatcataataattaataataagaattaaataatttatgatatttctttttgttttgtaatcaagatacatatattattttcatatgttaaaaaaagaaattctaatattatttaaaattagtattaaatatcaactgatgtaaaatttattattatgttatgaaaagagttatttttaactaaaatatgtttttcaaaattaataaaaaaatattttcaaataataaaacataataataactatgtaagtttgatcaataaaatttagattgtgataataacttaaaaatataaaaaattgtcaaattaaactataaaagatttgttttacttaattcagatttaatgatatatctaaatcaaatcgcatctttttattttatatttatttttgattattgaaagtaaacggcacccgaaacacgttactgtcaacgcctcagaattaactaaaagaagaatttagcgaaaattaaaaacctataaaaaagagtatagaagtggaaagtgaaagagagggcgccagttttcaaatactacaatggggtccagcttgaacaacactagtccaatctctctaagtctctattatccgttccgttcataaatttaaaacttcgcactttcttcttcttcttcttttcttttttctttttttataaaggacgcacttactcgtactcttacccctgttttttctcctctcgtaagaaacaattaaaaataaataaattcgccttctcgtcggcatcgtaattgtggaactagaaggttgttgcgccttctcctccgccgtgcatgagcttcctccgccgccaccatgccggcaaggcgtccctcctccgatctgatcctccaccgtctcgcctcgtccgactgcgaaatcaagctcaaagccattcgtgaggtcaagaaccagatcatcggcaaccgcaccaagaagctctcctatatcaagctcggcgccgtccccgccatcgccgccgctctcgctcaagctgacgccgattccgcctccggctccacccccatcgtccagtccgccgccgcactcggcagctttgcatacggcgtcgacgccgctgtccgcgctgtcctcgacgccggagcattccctcatttaatcaggctcctctctgccgctgacgacaaggtcaattcgattaattacagcgtttttttctttttgaaatttcttttgcgtgtttggtttctctgacattggtgctaagatgaaattgcaattgtaagaagaaatcaggaagcactgcttatattgcattgttgctcatgttgataaattggaaattaggaattgaatagctcgcgtgaaaatagctatgtgcttgtctcataatcaacaacagtttgtagagtgtacgcatgctagattgttaagttgcgagttgttgatgtattctatttctctccttttcttgctaggtttattacagctaaaactatatatatttctttcttagtgatgaacgcggtacactgattagagatagaaagggatagaaaaatggagcggtagagtgtttgcgaaattcatctataggtagagaaattggaagggccaaaacttggatggtacaattggaaataaagaggagtccaatggttaatctcccggtaacttatgttttactaccgttacatgaagcatttttttttttttttggaacaaggagactctctaagggcagaacttttggctatagagcatggtctggaagtctgttggaatcttggctattacagtgtggtgtgcaaaacagactgcaggaatgcagctgaagaatctatggaagagtgaatagattggcatgtgcatggggatgtaatttgtcggattcaggatttcattgggaggggctggaatgtctcactcaatgtggtgtctcgagacattaattgtgttaccgatttgttggcttggtggggtacaaataataggtgtgcgacgcatgagtggaagctgccacctgtctttttctcgttgcgttaggcactgattctttgtctctagtttagttcctttgtatttctttccgtacatgtaccaaataaaattatgattttgtttggctgcttgcagtgggcatttttgctgttgacaattcattttgaatttctttttaagaaatttttttggtaaggataacagaagttttacccgctcttcttgcatgcctatctctttacctgcctacaaatacaagcaaatatacattgatttgcacttcttcctttagttttcacctatggtaaaatcatccttgatttgaagaaatgtatgttggcttctaattaccagatgtgttgaagagtccccttgatttgtagacacaacctcttcatgaaatatcaaaaagccaattaatttatgataaacagcagttgtgaggggaaaataaatgtattatgatctaatgcttctataatctttatgaattggctgtaacggtgtgtaggcattcattctagttcaatgcagtcagtggggtgtggacatgatttaccaagtattgtcactttgtatatcttatatctattccgttttaagctatttgctttcatattttagtgctaggatgaatggacagaggttacaggaagtgcatttgttattgtttctatttgatctttaaatgttgaatatttttcaagacttctttatgccttttattcatttgtggcatgtagtaggtagaacaaacataccagtccttaacccttatacattaattatcattgtgataagtatgtgatatgactgtattttttttccaaatgtcatctaatagacctgcctccccttgatttcaggttgtggatgccgctgcatgctctttatgaatgatttatcgatcaaaactagctccaaagtatgacttttttaaagaacaagacatgcaatttcttctttcactattgaaaagtgggaatgaaaatcttactggactaggtgcaagcattgttattcattcttctgagaaaagagatgaacaaaatatgttatgctgtgctggtactttagtttagaaacacttattagccttcttgatggttctctaagccagcgagattctagtttagaatcccttactgcaattcttaaaaacaatccagaagttgtctctaaatttgtggaccttcaaaatggaagagctttgagttcggtaattgaactaaccaaggacaggtattcttggactaggttactagcctgcttgtgcctgattagtgtaaagaattcatcttcttgctatctgcaagacataggaatcaaagccaaattggtacatattttacttgagttccttgatgattctggtcaagttggagacaatgcttcctttgccttttcaagtttagttgcagaaaaagaagatttgcagaagttagcatttgaggtacatgctattgataagttcaacagtcacttgcaaaactgtgctttacatcccaaacaacttgaagggatatttctaaccttagcagattgtaaaacttttgaaacagtcattggtggaatacaggcattacaatgtacattggtatcaatgttccaacttaatgatacatattatgattatgttatggtcctcctttttatatctccttcctccctccctctattttgggttgttatacaataggaggtgcaagcacttgggttggggagaagggaaaggtttcatcaaatgtttttattatgttgtctcatgattttatgctagtgttctgtcagagcatagttagtactgtatggaaaagctgttttacccatatggcagaacagcatggtgaattttttaccaactgtcataataggcaatttttgaagggaggcccactgtggcagtgctataggccgcaattgtgtgtttgtatggcggatttttggctttctaccacattctgccatcccccattgataacaccgcaattatcaagaatcaactatcccaaattttttaagttattagataaagacactagaatgatttttatatgcatgcttcctcatgcaaaagccctatgggcttgaagcatggacaatgcatggtgggggcatggtatcagagcctctatgtccttgtcatatttctaacactgtaaatcagttgcataaaatgtttatggtgggcaacagccaacaggagatccaccttcatcatttttccttacttgtatggttcaatgaagtcatttttgagattaatatctatacctttagattacttcattttgagagcatggttctaacgttctgttaatgctatttgggagagaaaaatagaggaaattaataaattttggagatctcaaaggaaatgtaaagggtgaacaaagtatttttccctgacaggatagaaataacaaattaacacaatgagcatatgaaaaaagaaaactgcaattgtattgaaatcttaatcttcaagctgattatctttttattttgtgtaggggatgtacttactcagcaatattgcaagtggaaatgagtctcataaagaagctatcatgcagctactctctacaaaagcagaaaatgtgtctcactctttcttcaaccagtttctgcagagcaatgacagtcgattacgcacatctgctgtttgggtcgtagtaaatctcacttttcctgcaagtcctggggcatttggtaggattgtaaaactgcttaatgtaggcattgtttctcaaatcaagaagatggtcaacgatccttgcatggatgtgaaggtcttttaatcttcatttcaaactggtcttgttctatactctctttggagtcaaacataagtaaagaataactaattctcgctaattaagaatgttagttaacttcgtttaattttcttatatctcatttataaaatgaacttcatttcctaaatcatcgttcgtgctaattgatggaagacttcaattctctgggaacatgtttcaaatgggaatactctctccattttaaaagccatgtgattgatatcatgagaataaaaggagccattgaaaataaaatttgaattaaataaaaggcattttgggaatgatttcattaaatagggtggaatcaattaagattggcttatattttggaccactatacctgagtttagattcacttatattttggaccaccatacctgagttaagatttgcttatatttgagtctggaggaaatacttctcttagttattttgtagtttttttttttttttgatgcagcttcgtgcaagacaagcacttgggcagattattacttttggtgatagttaattgtaatcagttactccattcaaagcccttgggctgcagggaaaaagagaaatctcgatagattttattttctcccaattcccaccttatatgtaaggtgtatcggccttgtgcttcagcatcaagtatggtatgcttcagtggatgtatttcaatgacttccttgctgtctttcctagaggttcatttctattctatttatgcaggccactggaaaactttactaaatatgctattgaaaattggaattgttgactgttatttagttgttaattcctgcttaactttaattggttaatatgatataaagttggttgtagttaaatattcctatataggcacttcataaggatgatgattctatttctatctttgagatatgttcatatttatttaggctcaactgcgaagtagtcttttagttggggatgaagatttattttttcctcattatttttcatacttgctcgcccctgtttttagctttattttttgttctggtactagtttatcaataatatgtttctcttgaagttttttaacaatatgtatcatgttctactgtgtcaaattgagatacatggtttttttcttgtttcgctttgcaggtgtctaaaattacttgtatttttttgaaccagtcagagctgtgtgtgaagcactcctgaccaggttgccccgaagtctctttctctttcgctcacattgtgtattaccttttgtaagtcggaagatcgaagtagatttacaggctttagtattgtactgagtagtaaatgccaattttagaacttagtttcaatttcattctgatgctgggatattgacaaatggttggattctatgtgtaagcaacatgtcaaggggtaatgattgaggtgtattttgtaaattattgtgatgttttaatgaaaattctttgcgaaccatacttttttttgttgacagaactgcgaaccaaacttagcacttgtactttatacgtaacaacacaataatttacaaacaatgtttttttaggtatataatttaaaaaatgttgtttttttgcctttaattaatgttatatacatagccatcaagataatattattttaatttaaaggtagtccaattatattctatttgatttttgaaataagaggtatttaaattttaaaattttgaaaggtgaaaacaatcaacttgttattattcaaaagaataagatatgattccccaaaatacataataagataagatctattgctcaatttttttctttaatttaatttaactttgatgacataattctagtaaaaaagaatgaatttggaagaacggggggcggggaggaggaatatatacattaagtgactttgtattcatgctgtttgcatatgttgtcttttacagtggtagcatacaagtaaaagaattaaattagaacttctgtttgatttttttccttaaaaaatctttaattgagtaatttctttgagttaaatgagtagtaagtataatacaataatgtcttcagtttttttgaatgatagtctaattttgtttctttatatgaaaaacattttgcgaactttattttacttactaaaattaaaaaataagcattttattgatgaggaaaattaataattgaaaataagcatgtttttaacttttgaaaattactttcaattaaactgcacttctacttttttctgttcgtgataattgtaattctgcttgaggttgaatcatacatcgtgcaaggtattgagtaaaccaaccctgtggaagaaataaataatttctttacttttccataaacttccgaagctaacatggctaatagattctagcgattggttacactcaaacaaatgcctaaaatttttaatccctattgtaaatccttcatttcaaactatctaaataatggatcttatatggaaaggtatagagatatacacaatttacagaacgtatcactagcaaatctagtaagagaaaaagatacagataaccaatttagagagaaacagattgccattggaacaaaaaattatacctagactagggagaggtaagattaaaagacagaagggaaaagaagagatcgaaagtcctaacttatcagccgattttttcggtgtttgtgtcatctgaaggccatattacagtttccatgagccgttccctcatcaactccaagttttcatcagatatttcttgatatatctcagcgtgattacatttctgcatggcaataagaggtgaagaaaggttataatttggagtgcatcacccctttacagaagattatcacatgccttggagatcaaacgaaaagattgacatcgataattttgagttcaattaccttgatccatttgccataaaggtgaagccgtgttatcatcactctttcagcaagttgatgttgctcctagcaatcgagccaaaaaacataatgacatcatttccaatgttatcaggtaacacattgtgaaacgtaattatcaaaacaatatgtttttatagaaaattatatgaacaatatatcctgtggaaaggcattagacaagaaaattggaggtattgaatggaaggaaacacaaactgatcagtagtttattaagctatacaccgagtaattcggtagtagtttattgtgaaagtgttttcagcactgcaaaaagaccatagcatgcttacgaggatgatatttctttaaaccagcatcagtattggaaaacattgtggcagtttaacatttggcataggaagaaaacgaacagaaaaaacagcttaaaatagcaattcttgagctgcacttgaaatgttgtttatagtactttttaatttcaaaaaattaaacatgtaatagttcacaaaattgtagtaaattttcaagagagtaatcaaaagacaaaagactcaacttcctactctgaaaattatcaacaaatgatataactgagcagagcacatacctttgtgagggatcgtataaaatgtttcctatctgtcgggtcgtttgttgcaacgaaactgttatcatggaaaacaaccaacaattagctaaaaaattaaccttatactatgtctacaaaaagttgattaactttattatttgcttgtaataatctattaaggtccaaataaatgttgtagaaaactagaaattgcgaaaggtatcgatgtgcatttactacttgaccgctttatcgatcaagattcaagacttcttatgcaaatagatttcctgtattcacacattcacatttcggatacatattttaagctagattcatcgagataaaatacgagtctgtccgattttcattcaactgattagttgaatgcgtgaatgtggaaattccccaactgcagagaatcctaattcaacttttcataaggtgcaatcagagcaacttttcaactgggatcaagaatctatctatgagataccagttcaagtataataatcaaaccgaaccagagcacttccattgctggcagtggcaagttttgagagtagtaaacgcacacaaagagttctaattttacaataattaataaaaaaagagatacttacagttgaatgtatgcaatcttctctttttcacaagttcattcagtcaacaatttagaagcttacttaacatgtgactgaatggaaacatcattttttaaactaaaataaatagtaattagaagagcatagaagtttgagtggaaattagcattgtagctacaacaacatagatttcacttacttatagaaccacctatactgaggtgggttcatctcatacaactgttgaagaacagtcctcacagccttgtatgtgaaataattgagtatttgctgtatccaaataaaagatgaagccagtcaaattgcaagcaaggaatagtagtatactcagtggcggatccagaaaaataatcaagagagacactagtagcagattcaggagaatttatttatgtccgcacatttagtggcgggattcgggggcagcgcctctgcaattttttttttgtaaagaaaatttaaaggaacaaacaattataaatcataatctaaaggaacaaacaaataatcagaccaaattattattctggattgaatagaacaatgaaagaaacttattgaaacttgcgatgagatttcaaaagaccatgatgacaacatgagagttagtttagatataaatattgagtttgagatctttgaatatgaaactgttacaagatagactaaatatttctacaaaatacatatggttaaactgtacttctcatttcaatgaaaataatgactttaatcatcttataaacaagtactaatacataaattacaaatgaaaataattaacaaatactgcaaattatataataaacatttaaaataattaataaatactataaataagtactaaaagtatattaatattttaatgacaaaatttaaagtgtccccaacttataagctagatccgcccatgagtatattatatacacatagcaaaataattaattaaatattcattcacaatgaccctggagaaattagtaaataatctcggatcatcatctgactattaatgtctatatattaacagaaatattaaaactttacaatttattagaagaattaataatacttgatcacatgtcattcaaatattcacaacacattatagtttcggactagctaagaatttatgaagggagtgagtatgttaagtagcagtacctttttgacatcatgaaaagtgtcctcatattgaccaccgagctcattgacaatagtgagtctcttagtcttgtccttgtgcctgcgatgcttcttgaaaattgtattaacactgtgactctgaacgaaggaagtggtgagcctcaacctcaacaagtgcttcctattgagacacaaaacactgatactggtactactagggctggtggccagagcatccacgtacaaacgtgggcaactgtgccactccaccgcaacagatacaccaccaaccatcctatcctatcctcaaacacagatgaatgatagaagatgcatgctcttttggaaaaccaagctcggatttttaagtgaatcttgaccaaacaattattctgaggtcctaaattttcaaactaacgttgcctttttcaattcagttgcacacttgggtttgtcaccaatccacgcacacacatcgcgcgtgacatttaaatatgatcgatcaaggaaaagagtcaactgagcatacatgggtattgccttttcctgctaagtgctagcaactagcaaggataacataatggaattgttcaactattattaatgataagagaatagaatctagatactttgattttttatctttgtttttgcaaacatattctaatttatatattatatatgctaatttgaattgattaatagtatacactaaatataaattctacttttagaagatttctaatcatgttataatgaatttggagctagggagacctttttataatttttttaaagatattattaatgtaattttttttatctttcaacaaaaatatttttacttttaagtttattgactaatgtttttaggatatagtgattaacatttgtcttttttctaataagaaataaaaatgagaggaacgtttttacttttcatgttaaacctctttgttgtttttgaattttgctagaatgagtataagatgaggaattatggtgtaatcactaaaaatccccctttttaatcaacattttaaagttaccccaatttaaaagaatttagaagattttaaacaagcaagcagattataaataaactctatactcttccctttttttccatttccctctcctccgacctttttagtcaatgagcatatactcctcattttatttatataaaaactcctttttgacttgtgtttatctatccaaaattgattagaacttgcaaaaattcttggttattgtacctcaacagtggtaaatgtggcatgatatgcatataatatatgtacaaattaatgtataggagcaaatgcatgacccacgtctgtccaaaaaacccttctagtaggatcctatatatggagaagcaacaaaaaagcaatttgaaaactctgtgaggtgtggtgtggtgtgattctgattagattaggtgatgccacgaggactagaagacaaaaactctgctatttttcaacgctcttaatcaattaaataattcacagacaaacatatcagtcagtgacagtggctgaatagctttggatcaatgaacaaaactctgcttctcggccacgggccactcagcgttattggttatgtagacagataacaaaaaataattattatattactatctatccttctcaaatctcaactgttttattcacttactacattttaatttgttttatgcagaacttaaacatgttaaacatctgtttgcattaattttccatctatttacaaattaactaataaaaatttattttaattcagatgaaaaaatatctacaaattaattaataaaaaaatattttaatatataatttttttcttctcctaaaaatatttttcaaaaaagcttattcaaacatgccagaattctactaagattagtcaaatataatttggaaagaaaattaacgttaagtttaaaattgaaagcaactatcacacctttatttgtaaaatgaagacacgtatagctcctgtccctcccctctttgtctttagttgaagaattgattcattttttctgtcacgtatgttaattattagcatgtttggattagattttttttaaaaatcatattgaaagtcaaagtaatatatagttttaatattttttttctttcaaaatttcaccttaattttgggtctcagaattaattatagtagctatccaaacaaaatttatatagctatccaaacataatataagtagtattgttatttaaaaaaataaaagttatatgttggactagcgtactaagttcaaatctcaccttgaaaagaaatttgaagttttaatattggactagattttattatttttaaaagtatataaggatctgatttgagaaaattagagaccaaaattatccctttgataaactactaaaattacctttaaaaaagattttttattttccttcttaatcacaaattttgttgttgtaaaatcacccatttgatataactactaaaaccactcatttgataaattaattgtggggactggtaatacaattaagtctttaaatagtgataaaaaataatttagttattaaatttcttgatttttgcataaaaattaattttgttgtatttttatagttgataaactaattaaaatagtgttgcagtttttggatagctaggaatgttattttgataataaataactttaattaaaaatgttacgactttcaaatgactttacagccaatagaaagggataagtggagaaaaaaaattattttgaataaatgtggttgaaattgtttcgtactctttgtcatttccctttttaattaaagttcaaaatttattaaggtcttaaaagttgtactaaattttgaaatctattttgataaaggtcttaaagttcaaaatctaaagctacgtgtggtagcctacaaactaatgtgtgcatgtaattaaaaactccaaaataaaagaatagtgtggatgtgtcaccgaccctttttagtgatccaaaaacttaaagtcatcgtacaccaaatataagtccaataggtcccagaatatttgaacgagccactttttcacccctctttgtcggccattctaatttataaccataatataggcccccaagacaagacgtatatatgtacgagtgtgaaaatctctgcctccaattccttctcctttttccctccctacctagggttaaatggaggtaaagcccaacaaagagataaaaagaatacagatataatactaattaatttacgtactttagtaagtgttagaagatttttccttcgtaaatgtgcatgagagagttattattatacacaactttatttttatatatattaatttggtctccttttaaagaaatcttgtcgtcttggattccttatttcatcacttgtccattctttagtgtaagtgtcatagtaaaaggagttgctttttcggtgtcagctactacacaaaatgttatagattctttcttgaggaatcattacttcatttcttttgtcatacgagagataaacataagaaaatttacatcaataataaatcatttataagactacattttaatcaaaaacttgaagttaaaatttatgaatctttttcacagtcatataatattcaaccttttcatttttattcaatctaaagcttcgtctcatacacttattacttcagcatttacaaaatcctcttttggacaaatatatatcatttccattttaaagcactctccaataggataagcttgtgtcctctcctgttacactagttagttatatcttctctacctggttaagtctcaggcttcttcttccaattgccagctttttgttttagaaacatttaccagttcttttaattaacctagcttatagctagctgactcacacaagcattttctatcaagacatggttccttctggaagtacgacaaaaccaacaacttcaagaaaaaagaaaaaaacaagaggaaagctggcaagaagccattgcaagaagcagcatgaagagagaagaaaacaagaaacaccaaagaaaagggacatggattctgatgttgctgctgctgtgtgttccactcccaaaggtgaaaagtttcggataccagaagtttcaacatgccctccagcaccaaagaagaatccaagggtgctttctgattgctctttgcgtagatcacccttaccattctatgcaccaccagacatagagaccttcttctgctttgcgcttcaagatcttcccgtttcatttgtttgctaatatatatatatatatatatatatatatatatatatatatatatatataagtagacgatctcgtgaaactttagaacatgcatggacttttcttatgtacttttagttttttctacatctcttgcaaatgagaggtatatgctttgagagaaccttggaggattttggagtgattgatcttaggaacagttattcaccctatctttctgctaactttaggagggtaacaacttgtaggatttgtctctctctaaatttagctaggggtacgtgtgctctcctaattagatatagattttaagtttattttcttttttctctgttatatatagaagatatattttctgaccttaatttgaagggtgctgtgatgagtgcaaagaatattggttttggttgtagatttgagcgtcatagcttggaattctacaaaacaaaacatagtttagtcaagtggttgctctgagagaaattaaagtccatcatattatcatatatatatatatacttcctttctgttcaatttcatcttttattttatttcttctactaatttcttctgcacaactgatgatggttataagtttgatatttagttagtagctacgtaccttttgtctttaaaaaacttgtgtgggtagatgacccttccatttataacgataaaaggattttcgatcgttggcaaaattaatcttatcaaattaaagagttaaaatatagttataaattctttaaaatattcaggtgatcagatgccaataaacgaattgatataatatgggagaaaaataattaatatatttaattttataaaatgaaacatattttgagacaaaccaaaatataatgagatgagatggagaaattattttgttatgtattgattgtattttgacacatctaggctgtatttttaggagtttaattccgggcaataatttgtaattagtatttttttattcataagttgtaattggtatgcctaaatcccactaataagtgtgtgtattttggtttttggtttttcaaacaaaaaatgaaataaaagtgaaatgttattttaaaaatctgaaataattttgtcagatgtgtgactgtactatacgtgtctctgagttcggccccacagtctatgagaatccaatgaaggggtctctcttattagagaatgagaatctcaagaaatttctcatatttttgcttttattttatgttgctaaatgctacttgctctactcgcttgtcgctactcatacgggaatttatttttctgtgataaaataagagtagtggaattgatgatctatacttatatagtgtccctcaaatgttactatttttttttttttttgctacttggtttataatcattatttgtagcaatagccttgcgtgtgtaaatgtacacatgcacacagatagatactttggaattaaggttttaaattacgattgcacgtagtttcgtcgttttttttatattgtaaaaaattaaagataaatatatatataactacggttacaaatacttcaaaaatcttaacaaagtaaaattaaaaattagagtcgtagaatattttctaaaaccttattcggagtaaaggaatagaagaaatgaattgaatgttgtgtgtggtgtgccatatgtgatatgtggtaatatttttgtacatgtataaagaaataattaaggaatatccttgaataaggatgtatgattctttccaaggatctatttgtgtgggggtagttgtacttagaatttttttaactttttaaatttatttatatggatctaccatctcttaaaatgggcctaaaagatgtacatattatagaggccagaatccatactttccgacctatcgaattaattatgtgtaaatttaaatacaatatagaaactaacaaaatttggcatatagttgacagacaataagttttttaagcatacggattatgatttaattttcttactatatatatgaaaaatattttgttgaaaatagttatatccacgttagtaatttctcaactttgaaagagattaatttccaatgtatcaaatgaaaaattcctttgatgtacaaaataaattttaatatatatatttttcatttatagaaatcaaatttaaacaccaaaaaataaaacaactcaacagagtaaaatgaattgtgctagatgctcttagtttaaaaatatgtttaagtaatcatataacatataagtaactttagattattatttttaaaagtaactctatcactgataaaatataaatatgtcttataccttcgtaattcatcatgcagagacatggagcttatatgccagttcgccactactatttgcgttttttactttttagtgtaaaataaagtgactaaatgggaagcaaaagtgcaacctgaacacgcgctattgcgaaaaggtagcatgtaattattttgtgttgaaaaaatataattgaaattgccaatagtgcctgcaagtagtacatggggtacacaatagaaggttctagcgtctatgtagtgtatatgttggacatgtcactcgttcaactagtgtgtctaacataaatattttttaagatttttgggttagtttggtacgagaaaaaatgagagaaaaaaataaaaaataaaaaaaatgattaatgaaataatttttttgtttatttaaaaaaatgaaaaaaaaatatttttaaatacaaaaatttaaattttttcttccctcactttttttctaattcaaattttaattttttttcttttttatttttcttccatccaacccaacataggattaggttaatattttttaaaaaaaataaaaatgcttacatgtcatgaaaaaaaactactttgactggcatgctatttaaatctatagtcaaaacaaatcccctatggttaatattcgaaaataatcctatattcgtcggtagtttctaaaaatgttccaatttagtcaattaacccctaaagtagtgatatttttggaagctaattatcataataggatgctctaaaaccttaccaaatttgattattttaacattgatcaggttaacttgtcagttaaacaagtgggttccaaaccacatcaacatttttatttttttttaaatattttttattgagaatccacatgacacatcatgtccaaaaaaacttcacgatcataagcaaaattcaaaatccaaaagaaaaaacaacatcgagttcactacatatatatcatgtgtctagacacacaaagatgacattactaccaactaaaaaaataggtatctttgacacatggcaacatctagataaacctgctattttatttacgacgtgtctacatctacataacgacatcataaacaaaatccaaaatccaaaaatattgaacttcaacccaagacacataacaacacccagcaaaatatgccaataataacaataatttcttgataattccgtatagtattgatattatatatatggacgaacagcgggttcaatgcatgtatgttatgtgtctagacacattaaggtcgcgaaaataaaaataaaaagagtgactttgacacatggtaacaactagacaaacttggtagtatgcttacaacatgaataactaaccgttgttgttggcaataataataatagcaataatatataataataataataataataccttgtagaccattaaaaggattcattatagaaagccactaaacattagctaattgttgactatttgatatgtgaccaaagcgtaacttttatttattaattagtatattttcttctcacaaataatactaaatacgtataacaactcatcgcacattagtgttaataaaatataaatatttatttaagaatacaatcgaaattatttaaataatgcttgatttcaataacttccatttacttaaattatttgttatattttaaattattcaaaacattctttataaacttaaataatataaaatctataattttttacaatataattataaaataattaaattattatataatttcacttttaaatttgaaacacatttaaatttatagagtaaattcattactttcttctgattttataccagaaagaaaactactttcttgtgatcttccacgtggatggatatcgtccgaactgaattagacccaacaaagtaaacaaacattgaaccaaacatgattaaaaggtaaattcttactttatagcaaagttattaaaatcggatcgaaccagccagtcctactggttggatcgggaatcagtaacataaccgatttgattatactattaaatcagtcatgcagttgacttggtcaaactcgatcaaaatcagccaaatcagacaaatcggatggttttcaaaacccgggtttgaaaacgcacaccagaaaatgaatatggcacaacagaaaaacaaaaggaagagaaagaggaagaggagaggtgatgaacatagaggagaggaagaggtgtgcagcacatgaaaatggaagcgcgtagcagccacgcaaatgaaattggagaagcagcgacagctactcaacacctatattattaggattaggttatagctttggccttcatttgcttttttatcccttttattaatttctatagtccttttgactcattttttattaaaaattgggtttgtattttaatttaattagttattatttatactctattttattattaatacactttacttatattaacaattttaatatttcaattgatattttgaatttttgaatatattttttaatcaaataatattagttatatatttatatataatataattttaaaatttttaatatagaccgattcaaaccggtttaattattgacccatcagttgaaccactaaatcactgatccattatcttaaccgattcaatgatgaaatcggtttttacaataagtatagtaaataaaataaaaggcaaatacttttaaaataattaagaaaaatagacgaagcccttaaattactccgagaaaaagaagaaaaaaacgacaacaacttaaaaaagtggtgccacgttttgcaagagatctcaatttgtttaatttagaagtgactaataaaataataaattgaattgtttatgggctgtgacgtgataataggtgtcccctcagtcctcactggcaggtaaggctcacctttcccccttttttaaagtaaagaaaatagagttaattatatggtggagaatcaattattaatccgaggaaactaaaaaaaaagatgtttacaaaggaaaatggacacgtgcctcacattgctgtcaattctcggaggctatggtccccacccttaggccacgcgtccaccggattctgctagtcaagtgcctgtcacgtggcccataaattgtgttcctttttccttctcaggggctctgatatcctcacccaccctccccctctcagatacccttttccctcccatttctctccacgtgtctcctccgtgaaacttgatgctgacgtcatcataagatgtcacttgaaatttaaacaggcaaggcaacactggactacatttgctattgttgttaagatttttttactttttattttttattttcactttgactcgtgaatgaattcctttatcctcatatatcacaactgaagtgagatatcaacattcagcaccccaaattctagttatagagaaagcaaagttctttgatttgccttcctacccccttaatttcctttattaatcaattgggaaatttggtctaattgtgattcattctctttgggggattttgaggattagggttagtattttctgtgtctgcatgtgtgaattctggcaagatatcacccaaaccttattttttttctatgacatgtgatgtgtgaatgttttctggtagcaaatgtgggagaattgggattttggtgcatgtactaggatcagataaactccaaattttggtgattttctattaaatgtagctcactagctagtgtgtatctgcttatgtgaacactagctatggttgcatgttggaatatcagtatatcacctggggctgtttggttgtgtgcctaaatatatggcagaaacaactgttgctgattatgattttgttcttctaggggcatttggttgctgggcactgaccaagagttgaaagattttatatttaccttcaaacagctgcggctcctgctgaagatcaagtaagagcaaaatggaaactatttttgttttaagcctctgtttgcttaacaagtattatatcatttcatgatgaattttaataattttgaatttgggtttctcaattttctttaagttgcacatgtcttataacttcacacatatgaggctatgaaactttttaatgtggctttactatcaatcagcatgctgcattttaagagcctttcattaatgaagctatgaacaagcagtagcactattgtaactttctgtgagttgtgcttgatatcatattgatcaatttgtacctctagaagatttggacatcaacgttcctgagacaattatggctatagttttcacttcacgtgattttgtttcagaaataccttgtttatccatttttttaattccattggagggtctcttattgtaaaggggaataaccactgtcattatcaacttttatttatcttgccttttgttttagcataaggaataaaatttgtaatccaatattcatttgtagggaactagggttctgaagataagatatgcaatccaaatctgaaactgcaaatcaactgaggtctgatccacattcctttacacctaaccatgcttattctgaaccctggtggcgaggtattcagtgcaatcctgtcccccaagcaatgtcaggagtgaatgcttctaattcatcttcacttgaacgccctaatggtgattcagaatccagtgaagaagatgatgatgccactaaagaaccacaacccactgctcctaatcaatcaggtgctttagattgattgtaaagaaaaatataagcattaaaataagaaaagaaaaaatttgcttatatatagtggcccaaattatgttcatttgattttttttattttagtccaagtgttacaaggttacgaggatattgaaatacaatattcttttcttggaaggaaattatggacaagaccaccaagcgatgcaacattcttcatcatctgcacctttggtgcgtgatgattgccttacacaggctccacaactggaacttgttggccactcaattgtaagactttgcccttttgttattttttatttttattttttagcatgaagagagggtgcaaagatcatagctttatgactatgtttaatagaataaatgtttgctgatttctgcatgtcaatgatgaaaattcaattattggaaaaattattgtcaaatcttgcatgcttttctaatggatcctagtatgcttcaaattcttttactacaggcatgtgcttcaaatccttattacgggggtatgatggtagcacatgtgcaccaacagttggcatgtgagactaaccagtgctcatacaattttttttttttacatgtagtttgtcaaactcactgttttgcatttcccataaatcaatctggttagaaatgtagtttgtgcataaccctgaaggatagattcttattacatgataattttgtttcatgctatttgttttttttttttttttcctgtttcaaacaatggtgacattgggatatcactgcaatggtataacatattatattttcactattagggatacgctccttttataggaatgcctcatgccagaatggctttgccccttgagatggctcaagagcctgtttatgtgaatgccaaacaataccaaggaattctgagacgaagacaggctcgtgctaaagcagagcttgaaaagaaattaataaaagtcagaaaggtacaaatgtgcactagcttatgcttctgtaggcatgattgttactctatagttctgtagttaattgccttaatctattttggaaagtgatatctcaacacatttcaggtttgggatatttgtcaacttattttattttacattgttctacaaccaatttcctttctgcagagctaaaactttagtttgacatgaaggagttttaactgtgtttatatctacacaggataccaaagtaagataattggaaatctagtaacctctgaaccgttgaacttttgaaaatcagtagaagattttaacaagagtgctgctttacctaaatgtgaaatgctatggatcttgaaagactcaataaattaagaagaataagatgttatcttcatttaggtttacacaaacatgtgtcaaaaatcaaaatttgtttttaatgagacaggttggcttctagtataatactgtgtacttcatattttgtacatgcaaatctgcgatccttgggcatactatactaacttctatttcttcacagccttatcttcatgaatcccggcatcagcatgctataagaagagcacgaggtaatggagggcgttttgcaaagaaaactgaagttaaggcttcaaaccacatgaacaaggaaaaggatatgggtactggccaagtcccattgtcacgttcaattagttcatctggttttggatcactgccctctgattctgccgagacctggaattcgcctagtgtgcaacaagatgcaagaggatctcaagtgcatgagagatttgaagaacacaactatgcaaatgttttgcagtcatcatctactttttgtttgcactcaggtgaaagagcggaggaaggggactgttcaggtcaacaacggggaagcatctcgtcggagcacacctcacagaggcgtcttgccattcagtaaaccattgcatggagtttgatgctgagattggtatataattagtggagtagtaggttgagtctgtaaacattggcaatttgcatgtcaagcggcaaatcattcttggctgtgtttctgctgttcatgatatggggagaagaatgattgattggaccatcatatttgtgtcgttgaaatcaaccagtccttcattatattctcttttgcattttgtacaaagatagtagtgagctaagtcaagccaacgaatcagaagacttgatgaaaagaactctttgatctactgactcactttcctatggcggctttattttatgtaactcaccggttattaatgttaaatatgagacattataagagatttgctgcatgattgtattcgcatcttcttaggcttttgacattttttttaccttgcttttgtgtgtcatcaggtcattagttcgactgaagtttgaatgtttgatctcatctagttaacgaaacttgcagtaactgttgggtaaatcaaaaacagaatgcttcacgtttcttgaaatactccaattttgtcatgctctgaatggaaatgcaaagaacatggatgttttgcagtttaacaataaattttaacaaagggaatagattgtttagtacattaaatactgtattttttacaatagggaatcccatccaaagctaagatcgagttccaccaaagttactgaagtaaaaggtcaacaacattgcagggtcacttgtgaggagcttctaattataccaagcttggcttaatctaaatattatcgataagacttaaaacaaaaaatcaattagagctgaaaatttccccacgaaatagaaaaaaagtccactttcaatttgtttgtataacatagtggaagaagaaccgaggaagtagaaatgttgagtttgagttcattcattcagtagtggataccttccgcatgttaccaaatacagaaccaccagtcctattgaaaatatgagagaatctgcatgtttaatgtccaactggattcagtgcagtctcctattccttgcatttgcaaccgttcaataaagatcgtgtcttcatctaatggttccaagttactaactgagtgaatgtgtggaaaggccattgcaacgattaaaatggaagaaaaaataaagtaggctatctgagtctaattccttggagaggtctcaaagcttctcagcctattttttcagttactattcctttaatacatccagtaagagtgaacaatccaaataaaaagccaaaaatgctgaaagtccgaagcagtacccacttactcgtccatgatacagtactggactgactcaagtatatttccaccggaaaatatatggtcaatggccaaaaaatgatgctacccagaacccccaaaatctgattgaagtagggaaatatgattgcaatcacagttgttgatgcaacataagcagttcggaaagacaggctgagaaaattaagttcaaaggctggaagcaacgggagtttcaacatatatatgtgattcacaaattcactatctgggaatctaaaacggaaccaattctcaacagtggcaaaaagtggctggctatacacctgcaccaaaacaagttagatgacacttaaatgaacatgcattctaatttctataatgtaaaatagtacagacaagtagactatatgatgatttcataacacactaccctaagacaggtgatggagaatataggaattgaagagatatcaaatgggagcaccatactaagaattattgacatggtatctctatatttatatgtacctgatatgaaccaactaggtgaaccactatacaagcattagcaaagttcacaagccaataagacttggatgatccaaaacccgttaaaaggtttcctggtgtattatcaccaaaggcagcatatccagcacctccacaactgaggtacacgaatgttgtgacggtgaccgctattactgaggcctttttcatggtttggttttctggtggaggcgatttcaaagtatccttcaaggattgcagtagattatatcagtctttataattgttaaaatccccccacccccccgagctgtggtcaagttacattctggttatctgagttcacggggtatgtacctgtatttccataagaattgttgagaacggatatgagaatgatatgtcaccaagtgcttgagaaaccagccataacttttcagctccactggaggtactaattcctccaatgctaccctcagcatgtcctttttctgagcaattttttttcataaaattatattttctacataataattagtccaatatatatttttcaagcaaacgtccatgcacaagccagtcattgtgagcctaagcaaagactcgccatacgcatacctatgatttgagcaatggaaagccccagtcctatgaaagaataagtaaaggacataattgcagcaacaaccgacagccatttgatgttatggaagttgggtatctgtgagagaacaatttggatagccccaaaaagcagcatataatatgcatctacagattcacatgctgcttcaggcccttcgttgtggtaacaaaatgaattttggattgttctgcagccacaaataaaaatagcagttcaaatttaatattggcaacatagggtgagattcttgggatagacacatgcttccttagtggagtaccagtgtaaaaatcttgttttgcacaaacggatgaaaagaagaacaaagaaaaggaaatgacagaacaggagaggaagcagtatgataagtgatgaatcaacacaccttaagctgatagctgttgtgatgacgaaggcaattgcaaaaccatacagacttatattcacaagaaggccactgagccgtccattgcttaatcctgttaccaccgaaagaggatcttatcttataaaataacattctagcctatagaaccatatcaaatgttccaaatgaggtaattggaaggagtataatcgatcgttcatctggagacactcataagattttttcaatacacaagagtcgatgttaaattgtagaagaaaagaaagggaattgtaccttgtacgtacctaaatgcaaatgaacaacatcaaggtaggaggcactcctattgggaccatattcgggatggggatggcgataagtgttgcatagaagaaaagaagagaagagagtggtggaagcaatgagaaggatgcagaatgggcctaaaagccacccaagctgtgcagtgctccatggcagagacagcactcccgatcctatcaccccagtcactatgtgtgccactgctgtccacaccgtcccttcatcacattcacaacacacaccaccatgttacttagttatactatactataatctattcacttttgcacaaaacaaaacattttagatgacaacacaacacaaacctgtccttttgagagattgggtgagtaacagtgggaggttgtcatttgactcagtctgagctgacacacccatcttcacaccaatatcagatcagatgctatgtcatctttgccacttccattcctgtgaccttaaataaaagccacacagggagaaaatgggaagacacaatttggatttttctcctgttgttgttacagccatgatgggcaaaaatgtcaaaagcccatgtgggaaaaagaaggaaggattaccaagagtgtaatgccaaaagctgctactagtcagcgaaataaaataacttccgttttttttttttcttgacaaacgcgccgactagtatcataagaatattaaaaagttaaaagaaaataaatgtttttattagaaaaaatagtattttttatgatttatacaataaatatttttttcttttagtacgttgataatgtcttaataaatcggactttatttatttatttatttagtttaattatttttttcatttattttatagaagatagtcttcgcacactcgcactctgagacagtcttaagtgtatgttgttggtttgggctgcatgcatcgttgtttgacaaattacgtaagatagtactgcacattagaccttagtacaatacacataaccccaaaaaacaatttaggatttaaagtgtgtttttaaatttattttttattttttattttttgaaaatactatttttcataattaaaaatatactaaaaatgtttgataaataaaatagaataaaacaaaaggaatataattaatttttgttttatgttttctacatattagtatatgatccataaatgacattttttattttaaaaaataaaatcaaagatcaaccataaaatatagatccgtgtggtaaacgcaacaataaaatatatttccgtgtgataaacgcaactataaaatagaacgagactaaatgattaaaacaataatatattttaagatgataaacgcaaccataaaatatcgaaaacaaccttctatagccggtccaagatatggtccataatggatcatatgtttcactggtccaccgaagttttgccctgtaaaccactctcgtatatggaaaaataaggggtgactgaaaatgagatgcacctttttgaaataactggagtgctgggaacaataaatggttgattagatttctgttaagactgcctcttaaacaaaatcaagtaagaatccatcaataacttttgtaaacaatgtttaggacaaactacctcaagtcagcaatcttacattcttagaatgtcctattctaacaacatagccaataacatgccatcaggaacagatccatttcaagtcatcaaagagcagttatcattctctttatctcagcagatctgctgggatccggttcttcaattgttctctcggtaagtacttgcttgatgcggcacattgactttctcacctgatttcacaaattaaattgacagaattactgattaatttccttatttatcacatcaaattaatatcaatttcagaatattagtttctaataaaatcgattctcccataatacattcttgaagaggaacagaaagtgtgactaagtcccaaccaaaaattagttccattaccgattcaaaggaccaaaacttgtgggaatatcttaactggagtcaaagaccctaattaggatgacaaaaaaaaaaagaatactagtttgtattctctctgcttccttccctacctaaatccctataatctcaacactatctattatagaagttaaacatgcaacattcaaattctctctaatcaaatctatacaaaacattgttcatgaaaataagataaaagcaccacttctgtgatttttctatgccaaacgtagacataactaagggtaagaaaaggccaagagcaacatttatgtaacacagaacaagggaaaagaagtgaagtaataccttggggatgcgctcaggttaggaaaacgcaggctctgtgcattaagtatctgacgttgagtcatcaacatgttcttctcctttaacaacacacaccacaacttatgaaggtcttcccaagattttagacgcaattccgatgccttccaactccgacctaacaacaaatagataaaaaagtaaacaaattcataaccagagcaaaaaaacggcacaactttcaaaggtcaatgaagaaaatcagaaatatttgtactagacaagtctgatcataatgaaaatcagagaaaaattgtcatcccaaatccaaatgaacaaaagaggtgcctagtgcataccatatacaacaggtttgtcatcgtcagggctcctgtctgcctcaaagaactctccttgctaccaacagcagctgtagtggcataaggttttgatctggcagcagcagcggcaaagagtgtttgtccaattctgctctgtattttgacatataccagtattttttgacagacaaacttagctattgaaaaaacaaaaaacaaaacaacaagagccaaaccagtatccataatatcacatagaaaccaattccattgcattaatcatcaaagttcaaaataagtcgaactaatcaatctatatattatgaagaagtaaatataaatgagaaaatgattacaataaatctctagttatatctacatagtcatctattctaatttgaaatgaagaattgatttgttgtatgcgattcaagctgtcaccgtagtatctatgcctttgtggtgcagtaagagttaggggagcttcctccttaaataagcctataagaggacacaactaaataaggttagcaaacaaattgacagaatttcaatgctaaaaattacaaaataattgaaaaacgtatacttgcacaaagtaaaaatcgtgaacctatccaatagcaatgattcaattatgtgcaatagttaagggttgactactaagtgggaaaaaaatgcaaacttggataaagtggaccaacaaaacatcttacctattaataataacacaatccatgtcaagaatagatatccaattatcaaaacttgctacttattattttaaacatacaaataggagattgcttccaccttgttttgagccaaagagttgagcatattcaatatgtcatcgctaaagttcccaaatcctatcatcacgaactagaatccaataatcctcacccttacctaacaaagctgccattgctcaataattgccataaacatcaaacaaaaattcaacattaagacaaaaattgtgtcacgtcatcttcttttatttccacgaatattaaggtaataatcaatattttcatgtttgttaagagattatgataatatattttcagatataagttattctcaagaaagttatactcataagttttaaacattttctattcctacaaggtgttagagataaatatgtatgtccaagatacaattcatcatgtcattaattttaataaaaaattgttctttatttattatatttattattttattaaattgttaatttgagaagtctttgattaaaattagaaagttgttatcatgatagagattatgataatgagaaataagtctttataattttaatctaaattattttttaatataggattattgtgaatatgatatatataatctagatagatcaatatacgtgtaatggtctttattggataaagattaatatatctcatttattaaattgcatatatagataatgtacatgtgaatgtcatcattgaactgattcaattaaaaaattttaatagttaatattaccttgatatgtcaataggaagttctcaataagaaatataataatttttttacatgagattatcatagtaattaacaagttatttatgttgttttaattttgaacacctaatgccttatgacactagttgatgaatagttgaatgaatattggatatgattaaatatttgtagaattaatgattaattaaaaaggaatccataaactttaggtaataattgagctctataatagaattaagaccttggttaggacaattggaggaaaaaagaaaagagtttcttaggtcattcgttaattagatgtgttagcttattaaagtttgacaataataatatactctaaagttaaccttagatgtaaatgatggaagtaaatattacattaattattcttctattggttcttgaaagtaaaagactttaagggtgttgatagatgtctaccttgattagtaaattaattatgattaaattactatcgatttaacattgaaacagggtcacgcacaaatgaaatgaatgtttcaatctttgtaaaagaaaataatttatttgataattaaattagagaatttaatcaaataaatattctagtgaaatattattttattatataattaatataaaaaagagtattattttataaatgtgaaagttgttcataaaataaaaataatattttattgcttattaaattagatatatgagataacttttatttttataaaaaataaagagatataatttttttttctccctttgaaaaggcccaactccataactttttaacattataaacagaagtatttactacaccagaaaaaattaaaaaagttcaagttagttttttttagtgagaaacagaaagaaaatttatttttcagagtttcactcattatagaattgaaaaaattaaaaaaattaaaatctaattttttatgtgagaagtagaaagaaagttagaaagttagaaactttattgttcgaaatttcactcatcaaaaaattgataatagatattaatttacttaattgaagaaaatttttgttatttcaaaaatgtaaataatataaataaacaaatctatttttttctatttattatgtgttatatatattttgaatacaaaataaatcctaattttactctccaaactatcaataagatgaggacatttgaatcgaaacccatttgtaataggctactaatcttttaaagttttaactgtattataaaggtaagaaacctagcctttctttgcctcctctgactgtcttctaccggccaccgcaaacaaccaccgacctccgttctactggtagagtagtggtggtcgattgacaatatatattgattcagatgtaatgtaatgtaagacgttggggtccttttgtttcatgctaaatacagaaccataatctcttgtttcttcttcttcagcttccattttggttcaacgagcaagcgcttgtcgttgtttccctaagcatggcgcataggttgctcagagatcacgaagccgacggttgggaacgctccgacttccccatcatctgcgaatcctgcctcggcgacagcccctatgttcgaatggtctgtttcggatcctcttcgtttgttaggttttttttttttctcttttgttcttgcgagattgaatgagttattattggaatattaatagttatagtgataataaaaataatgattgtttagtgaggaattaaaggttgaaggaacaactaaactgagtcagattttaatgtgtggaacctcgtcatgtgaccagctactaagaatagaagagttaatttgttcaatagctttggtttgcgctttgcagtatttttatcctgagaatgagaaatttctagatggcaactgctaagtttaaaaccttttatgttattcaggcaggccaatggttttgttttcaaatgtctgaacttggattcctggagcatcttagcttaattcttctagggcttttcaaatgaaagagcttaattatttcaatttttttcatctttgaagtatcgaacagtaagttttttttttatcacagagtagttaatgttgaaatttaaaatggtatagttgatttactggtgtactatgaaaaactatggagtcgagggagtccgtgaatgtgcttagttaataattttcagatttcagcatcttccattaaagatgagattgtgggaatccaattatttgttcaattgcttttcattatgcttatctttcggtgcagacaagagcagagtatgacaaggagtgcaagatttgtacacggccattcactgtttttagatggagacctggtcgagatgcaagatataagaaaactgagatctgtcagacatgtagtaaattgaaaaatgtctgtcaagtgtgccttctggatcttgagtatggactaccagttcaagtccgagacacagctctcagtattgattcccatgatgccattccaaagagtgatgttaatcgggagtattttgctgaagagcatgaccgtagggtatgtttttcttatgctaagtcatgtttatagtttatgatagctgaacataattaatgattggaaaactagttatgggtttaaagtcattctgtatgtagtcatgagtgaattgttatttttgtggcttgcatggtttttgtaatattttggagtttttttttttttttacatgaagaatttctcaaccctggaactctgattttcacattctaaattgacaatagctattaaaatttcaaattttctttatccatttttttaagaatctataagactactattttgactcagttctctttggtcattacttgatcgtgatctttttactaagaataaaagcatggtgcaggctagagctggtatagattatgaatcctcttatggtaaagtacgcccaaatgatactatcatgaagcttcaaagaacaacaccatactacaaaagaaaccgggcacatatttgcagtttctacattaggggtgagtgtaccagaggagctgagtgcccttatagacatgagatgccagaaactggggaattgtctcaacaaaatattaaagatcgttattatgggtatgtatggttaaaaatgacttccttatttgcttttgacttttcttactcgatctctctttcaattgctcttttttagttttttaatgtattggcatttggcactgggcagcaactcaagcattttttatctctgtgatggatatagttgttggtttattaggcactcagttcttttgtggttgttctgtgtgacgaactattgtgtagctaagataataagcttgcaggtttttttttcccagcaaagtcatgtgatagttctgcttgtaggaagctttgttttaaacaacaataatcaagccttgttccaccaagtggggtcagatatacaagtcaaaaccactatttgacattaacatttggggatccaaagtggcaaaattttattgcttactaagttttcttaattgttggtacaaaaaaaaagcagctgattcagtagcacgggctacaataagagctcggtgtcattatgttaataaaaagtggctaataactgccatttacttgcaattttggctttcttttttttccttctatatgtggctaaactgaagtcatgtattgtattgttctcagtatttagtgaagtggaatggcttatcttgcctgcattgtccttagcctgtaatttttcgtacttttaagaatgttttctttgtactttgctacttgtcgatatgtagtaagagaattttttgacatggatgaaggttgattcctttataatatgttacgtttaattttccattgtggccaaaaatgatgtagcagacagtcaacagccatcaaatatcttattgtgaggataaccttttggttctatattttagtgctatatgtgtataaagattattccttttcaatctcattaacgtatcctctacttattcttagttttctctgcatgaattccttgtgactacagatactgatgatatttctagttgcagtagttggtgtttttaattttgcttcatggttttgacttcattagtttgctgttcatgctttaaaacgttcagggtgaatgatccagtggccttgaagctacttggtaaggcgggggaaatgaacactctggaggctcctgaagatgagaacattaaaactctctatgtaggtggacttgatgctagggtcactgagcaggatttgcgggatcacttctatgcgcacggagaaatcgaatccatcaaaatggttctccaacgggcttgtgcttttgtaacatatacaaccagagaaggtgcagaaaaggcagcagaagaactctccaacaaactggtcattaagggccttaggctaaagctgatgtggggcaggcctcagacatcgaaacctgagtcagatggctctgatcaagcaaggcagcaggcttctgtggctcatagtggattgttgcctcgggcagtgatatcacagcagcagaatcaggaccaaatacaaggaatggtttactataacaatccaccaggaccaccacctcttcagcaggaaagaagctactacccatctatggatcctcaaagaatgggtgctcttgttgcatctcaagatggtcctcctggtgggccttctgggtcaggggagaacaagcctagtttggagaagcagcaaatgcaaaattatacccatccaatgatgccacctccgcctggccaatatcatcatcagtattatcctccatatggttatatgccaccagttcccccttatcaacagtacccatcttcatacaatgctgcagtggctccatcccagccaccagctgcaaatcatgcttatcagcattctatgcagccagggtcttcacagacagggtctggacaggctgcacatgccccagctgaatctggaacctcaacatcaggatcgcagcagcattaaacttgcccatatactgatgtttctagctatgtttaagtttttccttaaactaactatgctgtcatggaagatattttcactcaagttgtcaatttactatctctactagctcgatattgatttcctcgtggcttgaacaagttattttataatttgattttgtgattttgaaactcttggcttcctggttaaatcatagtcatgctcagctttagtactacttaatgaattctaatgatactacaactgaacttttgttttggatataaagcatttagtaaagatggccaattgattttataccgaccaataattcgtgaagaatgtagattgttttagaactctctattgccgagggttgtgttttttctttattttgaaaagcttccattggttctttctttcttttctctttttggttatagtacgctcgtgtataattcttgaagagtgtagattgtttcagaactctctattgccgagggttgtgttttttctttattttgaaaagcttccattggttctttctttcttttctctttttggttatagtacgctcgtgtgggcactcttttgttaatcttaatgataaagtaatatatgaatgattaagataacgagggcctttcattcctaaactgtgcatttgcatctgacattttgacattcatctttctgtatacccttattaatggatttctatagtgatttttgatgcctttcaacatgtttttttaataaaaaaaatatttattcatttcttaaccaatacattaggacactagttatttgggatgactttatattatgtcaatgtaaaacaaagttatgtgacattgcacaaattttgagctaaatctaataatccagtatcaattcaagtttatgtgtatagagttgtttgtgtagcatacactttctttaaagggagtttttcaccaaacagaactattccacgtccacaccaccaccactttgagacatccccacataattggtatcccctttattaactctcaatagtaaatagtaatagaattaatgtgaaactgaattacatggaagatatggcaacaagacaataaactcaaacaaatgaagcacccttcattatcttagtttctcacttattattccttcaagtgatccaatgagacccactaatgacaccagaaagcaaataaagctgaaggtcctaaggacaatccattttctagaccaagcttcaattttcctctgcacaaagtacatctctaccgggaaatatatagccaatggccaaaagcctaaggctcctaacactcctataacttgattgaagtaaggaaataggatagcaagtccagtcgtggaaaccacataggctgttctaaaacatatcctgaaaatgtttagctgaaaagctggcaaccgaggcagtttcaattggtagaaattattcacaaatccactgttggggtatctttttgaacaccatctgtcaacagcaccatatatcggctgactgtaaatctgatcaaaagatcataaacaagaatcacaactatgatttgtctggtaacatgaaaagaattcagatattgttgcatatggacaagaattcatatagcttaatatttattattttattttttctaataaatgtcattggagcatttcataagctaagttaggaagctaactatttccagccaaacctttcctaataatgtattaatttagaacttctcttgtattagttgttttaatttcttccttatggtaactttacctgttacaattgtgctttcggtatgaataccatcatttctattaattttacattaagaaagaatgtagtagttcaattgattaataagaagttacagtcttaagtataaaatgtgaactttgatcagtagcactagtacctgatatcctccaaccaagtgaagaacaatgcaagcattcgcaaagtcaatgagccagtaaggctcgtaaaatccaaaccctgtcaagaggttccctggtgtttgatttccaaaagctgcatatccaaagcatccgcaacagaggtagaagaatgttgtaatgaggatagcaatcatggaggcctttttcatggtcttgttttctggtggaggagactctagagtgtccttcagtataaaaaaaaaaaaaaatcaatacttagcttcagctgtaaattgtgtcttcttttagagtttaatttctataaactgataatgaaaaaaaaaaaatgcaccgtcaactgataaaaaatcatgttaaatacaatttttaaaatagctattataacgtaaacaaacttactataaataacaatttgttattgaatcacaatataaaatatctttacagtttacttgtgagtgcatttaaattaaattctcctttacacgttcctctcccacccaattggaatatgaagggtacctgtatctcaaggaggatgactgtgtatggataggcaaaggcaatatcaccaattgcttggaagactaaccataacttgtcagcaatatttgaagccggtactcctgttaaactacccataattcttccattttctgcaaaagcaaccaaaagtctcatgatccattgttctctttccactccttgattctaagaaaatatcataatatagtttttttcttcatacataaattccacattccatatattttggcatttaatatgtttttagcagctacatttgtgttttagaataatagtacttgtttttttttccttcatcttgtttcttcaatgatcagaaggcttgaacggacaagtaaacaaaacattaaattctaattgtgaaaatgaaccttacctatgactgttgtgattccaagtccaagcccaatagatgagtatgtaaaggacattatagccgcaacaattgaaacccatgccatgttgtggagatctggtatgaatgacattatgacctgaactagtccaaacagcatcatatatactgcatccccatatttgcaaggagcctgatgcccttccttgtgataacaatttgatttcaatatcgctctgcattttgtagaaagaccaagcatcgttagaacatgaacacaaatatcattaaggtagactagtacctctaatattacatgagataaaaaaaaagcaacagatgatacaagtaacaaactactacacaaattcaaaattgcatatatacaatgatcttttcattttacatgggatttaacgggaattgtacctcaaacaggttgctgtggtaattacataagcagtactaaccccatacaagctcaaatattgaagggaaccagccaaccatgtccttttattgcctaaactaacagaaaacataattagttggcataaaatatggtagcatttcactggaaccatatcctgaatttgagactagagtgcttgtacaagaacaaggaactaccaagatagactctaacagcatccatgtaagagtagtttcttttcccagttacaggatccagagttctgtaacaatcggaaaggaggaatgaagaaacataggtgacaattgcacaaaaaagcaagcaaactggtcctgcaatccatcccaattgggaagtactccaagctaaagacagaacaccagcaccaataatggctgtgatgatatgagccacagcactccataaagttcctggtaaaattgatggaaggactaaaattcaggagtcaaattcatatatatgaatatggaatggtcctagagatttttaccggtccttttagcacgtccatcatcgtcataaccaccactaccacttctagttatttggagagatttttgaacagccatttttatccaagcatccaactcaattggtattcatggagttcagtgtaattgaattccgtatacagtctacagccaactacaatcaaaggaactatatggcagctacttgaattcaaaattatgtttgtttggtaactacataattttggtctgcatgtcacatgcttatgaaattaaaaaaggagatgacattttatatgaattttcaaaattgataaaggactcttctttgatgtctaggacaactctcctaaaattaagtaattgacgagcagcatagaagaagttgcaggaaatagtgtaaataaatctaaactatgctgataaacatgtgtgtctgtgccaaaccaaaattaaaatagctagtatcttaaaacttttggaagccatgttcttgataactaaggtatgtactaaaacagacattactagcgacaggacacagcataaaatcaggaaaactttattgtactagatttcattataaaaaatacaggccagaacatgatgtgtagaggaaagagattctttgaagtttgaagctgtatggtgtatgactgtggtagccttttaataaagatatgtactcgtcatcataactttctaataatggagctgtcgtgttcttgtggaatatattctctcaatgctcaacattgtgaaaatgattcagtaatcagtatctatcagatgaccagaggtacgtgagtgaaatagtggggttaatgtaggaagattcagaatatttgaaaatgtacaaaatagataatttagaaaacttacatattatgtttaacatcatgttgggtattgctcaccttagtcaacacaccaaatactccaacatcatctctttctggtagtttgtgtacaaactttatatacatcacaatacttcataccccaacctactacatattattagattgtttaagaccaccacatattcatagtctcctctaatttttaaacgtcacgtattcaaaattttcaatttatgaaaaataattaataatatttttttacatacatgtcacgtggagattaattaatgaaatgataatagtttttatccacctaataatttctcacacccacccccctcaaaaagagagagataagagtttgtcaattttcgcttttttcactatgcctctcccgtacgagaaggactctattatttgacagtcttcaacaaactaagtgaatgaatatttgaaattatattggttttgtccttgaagttgaaagcacgccaaacgtggaagaccagagtgttttatgctcctattttcaacacttgcttatcatacctatagcccattacgtgtagcttctttctatccaaggagcgtatggaaaatattggatttcatgaagaatatgtaggactagaataggttgcgtaaaatgaatgtatactggcaacatggttcaacccttccttatcacacctaagggctaaggcccactaccgtttagcttctttcacttcaagctcaaggaacgaagagaaaatttgtgattccattgaaaaatatgtagaatcattttgcgtaaaagcaccatctttattcagttgagtaatgtcttttgctactttaattgattggaatatcatttggctcatccttatcgtaagcaaggattgtgctaattttatgggactttgtgaacttcccatatgcaaagataaagtatatatagtcttttttgtgcagcacccacaaaggttacaccttattgacgcccgcacacagaacataaatgaagtccagccaaaattgccacagcaaaaaaccaatgtcatacatttttacccagctaataaattatgcccttcaccaattgccaataaatgctgcacttccaccagcacttattgcaccccaccactggattagcaatgtgctaaaggaaagtagatatgaattcctgttaaaataactggttaggttaaatgcttggaaatctctaggtaaatatattttgcggttgcctctcagactcagatggaccacctattaatcatcaaataaaggaaagtatatacgtattttatgccaaaatgtctacctcgctgaaccagaatttctcataaactgtagcctatgtagcaggttggacctgtgtcttttaactcaataggaataacgtctgttcaaaataacatatatactctccttcaaaaaaataacgtctgttgaagcccctagtttcaaaagttgcaatttggttctgatactctgttgatttagtagtagaagtgccatctggtgggaaaatgcaaggatgtcatattaagggcatgtatgttttcactttttgattttaaaaatgttttgcaaaacaagttcacagttaaaaagtttttttcaaaacaatttcacattattcatatattaaattttcatttaaaatctattacattttaaaaattgttttaaaatacttaataaaacttttagttaccaaaagttattggtccaagtaattttagactcggtttctttaagtaaaatttcggatgcggaccttgtggataaaaaataattacggtacttcgtaagattcaatttgcataattgaaatttgattgatcaaaaatataattaattctaatcttcgatttttatcttgtttaatttttcctcatttactcattgtgtcttccagacttccactatcctctactctaccaactttttttaaattattttttgaaaaccaaaaatatattttagaaattagaaatcaaacactccccaaattcaacccctagtatgcgtgttgcgttcaattgtacaaaaaaagattatagaatgaattaagtttttttttttttttaatcttttggttctggtgttgtcagtggttattacttactacaataaggcccagtttagttataagagaataacaagagatttgaattttctacctcccatcttgaatcatgtatctcccaaatttttaaaaatcacaaactacccttttcatattaaacctttttagaataggtattttataacaataaaaaatagttatggcttctagaataggtatttcataatcgtaaaaaataatttttaaaatagatgtttcataacaataaaaaataatgttacataatagtcaaaaataatggttgaaaataaaaaatattttatatattttgaaaaccctattctagaactcaatctgtgtttcagaattatcattccgactattatataactttcgaaattgtgtctttggaataatagttgaaaataaaaaatattttaaaatggtcgttccagaagacaaaacaccatgtttcggattacattcttacctttaatgatgatgtgcaatggaaggagggaggggaaggacgttgtgcgacattgtgacttgtgaggaggagatcacaaagctgccgtgaagaaggtgaaattgtgggagaagaagttgtcatcacgggagtaattcacacagagagggaagtgttagggttggagaagggtaatttgatattttcaaacaaaaataggaggatgtaagatacactactggaagtgcatgattcaaattccgaacaacagtctgcatgtaaacttcaaattgggctaggccgagcaagtattatggctagcccagcccgttaacggtaacttagcaaaagcaaacgtacagttagagccatgtccgaagattttcgaaaaacaaatataagaattgacccaaaaaatattttgactgaaaaaataaaagaaaaaggaaaacaagcacaagaggatttaccaagtgtgtgctctgtttaatgttgagtaatgtaaaatcactttaaatattagttaacgtgattataggcaaattttctaatgttcagtccggtgttgaagaattgattataagtttataatttactgagttaaaacaatttagatagttttgcgttagataaagaaaaatactgaattttagtactaatttgcttttagagtaaagatttttaaacataaagaaataactttacttcacaatcaattacaatcaaaaccaattttaaaatcatttttattcaaattaaatcaattttataaatgcttaccatttcttattttcacgtttcaacgttgatttgattaacagatacattttttctattatttctcaacttttctatttgaaaaagaaactctaccaaattaatgcaccaggttatatttcccccataatttccttatctatattaatcttcatttataaataaataaatacaaataaaaaatgactaaataaatgtctactatatgcatctaaactctaaagtttatatcacataataaattttattttttaatgttgcaggcattttgtcaaactttgacattattttagctatatgaagttgataaactctggtgttttatggtaattcaagagaaatcaaaggtatccaaacccaaatatgtatattacactcatcctaactcaccattagatataagtagaacagaaaataaagctatgccaaattaaaaacacatgcatggggttacctgatgcagtgatgcaccatataagcccgcatgcaccagcactccacacaccttttgcctcgtgtctcctaatttatcatatcataatatttcctattaatcataaaagtggaaataagcatggcatatataatagtgtttgatcactaacctaggtagaccttaacagcatcgatgtaggaggggcacctaatgttgccatattgaggatgagggaatctgtagcagtcagaaagaaggtttgctgaaagaaaggttgttcctgcaaagaaccctaactgtgccacagaccatgctagagacagcacccctgcccctatcacaccacttattatatgtaccactgccctctctacattacctaattcatgtcacatgtataaagaataatatatagttagaattttaattacctttctttcttttgaatatttgaatggtaagcatgatatatatatatatatatatatatatatatataattaatgtcaattactatattcatctttaactttcatcacttggacataaaatttatgattaaaaaaatgtaacatggtaattaagaatattgatataaactccttcattaaaagtttgagaagtttttttttatcagttttattaaatatttttaattagttatacattttttaaataatacttgttacttaaatttctcaacaaacaccacactcattagaaaagacaaaggtgctaccaactgccattcacacaccagtcagtccaacaaatatctcactactgctattcaaattcaataccatctggctgcagagaaaattaatggcagaaattccaaggaggaagaagaaaagtaattccttttacatatacaaaagcattctgatgggagaaataaataaagctttcatattataaatgattaaaaacagatgtaataaccacttaccagttctcctaaatggcacgtcaagggaaggaaaagcttgaatcaatggagaatcatctgtttcttcctcactcatttttgtatcccttcaagcttgatcgatttgcttctcaaaaatcacacactcagggcccaagaattataatgaaaataattaaaagggtgtatgagtaagcatttttcgaaggcataacatatttatatatagacgcaagcaagcctctcaaataaacttcattcgaagatccacgagacacctaacccatgtttctgacctttctagtattcatgaatcttttttcatttttttctttcgatagcttgaaccttttttcatacaaccacgtaataagataatatgaatttagcgttgatctgttatagaaagtggaaacagcctttttacgcgaaaaatcataaaccacctacgtcgtagtgcccttttattccacgatataactcactaatactcgcaaaataaaataaaatattaaatttagttctagattattactgatgtattaaaaaaactatttatattttaaaaattaaataactgtgtccttatttacatgtaatagatgattgacttaactataaatataaaagtataaccaacttatttttctttagaagtatataaattacatgaaatcaatttatctgtgattaaaatttaaattaagatttaaaagcaatatacgtaaataaattttattaactcttttttgttcgccacatgtatccttcttcacattaatcttgtttgagatactctcaaatactgaatatatgagcagtagagatagtctcttttcctaaactcaactatgctagtaattttattaattgataacacaatttcattaaaaacaacattgaaagaaaaatgtatgtatattatgctatataataatatataatagtaaaactgttaaaggcttagacgaaagttcttaaatgttctttgtgattttaatgttgctttatggtatggtattttaaggccaatttagatcccagtagcataaagttgtgctgaataagatgttggatttgtgataaaaaaaataaattgcttccaatgcttttttaagatttctatatagtgataatggtgtaaagatattgtggtattgaactatgttgcgagcttgaatttggttagttataattctgaataaaccaactcaagtgtttagcgcttcattttcaaaatattcatttgaggtagcctccaccctggaaaaaccttggatatcatattattctttggtttaaggtttctagacagacaataatttaacggatcagttaaattacaaaaattttattctcttcctccaatcacaggttatactttttaatattatgtatctgttaattacataatcaacagatcggttgcatcatcatgaattttcatgcttcaaatgtacaaaacaaatacagaagattccaacagtggaaaattggacaaggagctcaacacaatttagcatggaaaaaatagtagtcacagattttatcaacttaaaaagcctaatccttgatgcaatataataccgggaaaccattagtgtgctttgacaacttgaggcagagatttgagaaggggcaaagagggtcttcgaactgtgtgattaagaagtaacataaatgtcagaagtgtcaaggctccagcctgatgtgcagtgcccagtgaaacaggtacatatgaaagaagcgttgaaattcctaaggtgacctgaaaccatgcaaaattaattacattatatactggatgacaacagcctctgggaaatcatatactagactactaacaaaaacaaacaccataaagtctttcttcctatttctattttatctatttatcatcatcatcttcatttagttaaagaatcagacaaaaacacgtggaataacaggtctgagtattcagttcgacaaaggaggcaatatatcgacaggcagagagctagctagaaacaacaatacaaaatgataattattataaagtatataaaactggaaattgaaattaagacctgaagagctgccatgccaacagcacctccaatcacagatcgtactgcaggatgtatctccagctttcttgttgaccaccataaaatggccacagaaatcagagttgcagttgcaagtatacggtgatcaagctgtcaagagcaatgcgaaacaccaattagaacttcatgttgttaaaactttggccgccaaaccacacttttgaggataaatttactactaaccaatccaacaataatggctcacaaagtgtttcaaaacatttcattcagttcaaatttctcaattcttgaaaagataataaaaatccatccaaaaaaaaatcaagaaaacaaaggtattattactatttaagcttttcagagatatcagcatggattacctgtacagttgatgtattctcaaagaaatttcgaatcagaggcttcatttcaaaaatgtcttccggtatccatgtatcacccatctttgggaaagtattaaaagcatgcccctgggaattaacatgtgagcagaatgattatctttatcctcaccaaaggctcaattatcatttcaagtataaatgtgaaaggcaagaaactattgaataagagaacatacagcatcatttccagcaacaaatgcacctgagacagcagtaagaccaacaagtacgctgataggcaatgcaagtctcctcactttagctgccccacgaacccatgttagcgattcagctggtggttcaggcataacaacagaaagtgcagtccagaagaggccacagtaaatagcaaatgctgatgtaagatgagctgcaagacgataagggcttacccttggctgagaatattcagatggtggctcctaaagaaataaaatgttattagaatctgacagggccggtcaatttaacttcaaataaagagaggaatttatattatttatgttccaacctctaaaccacttttgaccatccaccaaccaatgagaccctgtccagcacccagggcaaacagaacagagagtctcagtcctaatctcaacgtaatataccgcttatgaagaaaatatgaatatggcaaagcaaacataactcctagtgcccttccccacatacgatgtgcatattccatccaatagatgaatttgaattcttcaatcttcatgcctctgttaacactgccacaagcgcaaaactaattatcatcatgacattcataagaactactaagctctttgagaccaagtgtcaactcacttccacttaactaatcccttcccttgtttttcttgcaataaaaacacaatcagcactaaaaattgacctattcattcaattattctccatcactgtcatattaattatcatccccatactctgaaacacacaatcatgtcaatttttcttgcagcaaaaaagtttaaactattatttaaccgtgtaaattttatgacaaagtttgagaacagttatttaaaacattattcctaaatttttaatcatctgcttattatgatttgatttcaatcattaacaattagtcagccaacttcaagaagacttatttacatatgttaaggaatgagtatcttttctcgcagaaaaataaaaataaaaagtcccttggtgcatttcctaagttaatgggaaattaaaaaggtgtagcaagtgttttcagtttaccgcttgtactcaggtgactgcttatatttatcaaactcttgcaaccattcgtcatctgagaaaggagggagagtgccggtgaatttccaatcggtcattgaaagaccagatcgagtgagtctggttaaacccccaagcaccaccatgctgaacacccatgccgctgacccaaagagccatactccaaccaatttctgagcacgcgaacccccactcactagcagcttcaatccttctttttgttcagcagacaccatcttagaaaagttcctcatttgtggcacatgaacatgatgaccctaaataaaaagcatcatcccaacacaatttcctcagaactaactagatgtagtagtaactagtaactaatcattcacacataatagcatcatcatggaggaattaaaaaggaagaatagtgggtatttctgagaatgagatagagattaaagaattaggagtgattgtgaatataaaaagtaaaggaacagatgatgacccataagatcatacaagtttaaaagggataaaaattgaaaattgaagagtacccagatgagaaagtgaggtaaccttggggattagttgggatcggaaagcatgaatgtaatgggtggcgacgggaggggttaagaacttgaaaggtggtggttgggttgaagaagaagagaaaggcgttcctctaaggcttagcttgtgaattccgcatgcttctttgccgcgcttcaacactgaccacaccgttcccctaccaaacatctctgtttctctcctgcaaattgcaatgcaactttcagttcagggtttaaccaaggttttgttttgccaaacccaaactcaactactaaaacgcttattcccaccaccgacgtgtcgttttgtaggcctaaccattgtattgaaactccaatgttatagccttctatcctcaaatattattcatataatttttacacctttttctttcattgttgtacaaatttatttaaatataatttctcaaacaataattaaaaattaatcgggcaaattcatccttgaagacacaacttggtaagacgctcagaaattaatatttgaaagataaatttattatgcagattgacaaattgatctttaaactttacaacttaaattggttgtcaaaaaatataatattgtcaaattgatcatcgacaaatataatattgtcaaattcttaaacattagaacttaacgataaaatgatcttataaatttaagtaattaaatacgagattagtttgtcacactttttacatattcaaagactaaatttatattttttatttttgaagaactaatttgttcaaaaccaatttaactatttacccataattatataaataaaacacaagctggctgtggcctgtgggctggcctgttgccttattttcacttttttcttaaaaaatattacagtgttcttggttttagaactttgttcaggaagcgcttgattggtatttgattttcagcacttgatatcataatagcagcaccgatttcaatttagtaccataaatttatcagagtttatcgcagacttcttaaaaaattatccaatttatattctgaaggagcttattaatgaattttttggattagattttggagaatttgcatcaattttttttggtgtaaaggattagcaaaaagcccaacaacaaggaaacgcctaggctattgctagtaagctcggcattagtgcacttcaaaatgtttaaaatgtgattgatgacatttctagtgaatcactttggtattgtgtagtagggattgattgagcatttttagtttaatatttttctattcttcttagtttatttgacttctcttaaatttttattttctcattttaattcaatttttgtcttagacaaacaaaaggatttaattgctaattattatttattttcggattttatgctcacttgatctattttttttgtgcaggacctagaaagttctacagaacttcaaatgacacgtatgagtagtccctataaacaagggcggatctacgtataagagaaggggggcaagtgcccccccttaaattttgacataaaattaccataatactcctgtttttaaaaaaattcataaaaatatctaagaccaagaccacgagagagaccacgcgcgctcagtgactcagtccttttgcaagttctgctctgctctgtgctctccacgcgttctgctcctcctccgccactggcaggaccgccaccgtccaacgtcggccaccgccgaactccagagcctcctcgcgcaacatcggcacgggcgcacggcaacacctccgactctccgaggcttcgactccgagctgcatttcgcgcttccgtttctgggcttctgggctctggctgggttcttcaatcttcactgtcgggatcttattctaaggtctcgataatgccggaaagaccaccttacttcacatgctcaaagacgaggtttccctttccgatcccttttccgcttaagccctgaatcgctttaaatttactgggaatgttattcttttagttagaatccttttgtacaatttaaatattattacgaaattgagtgtttcaaagaagggttgcatggctaattgtctctaaatatatcctgtgcatgtttttaaatcccggttgtgttgtgattagcaatattatggaaaattgtggctgtggaccacaatttaaagtcaatcctgtgtatttgctgatgcagttgaggaagcctaaaaaactgcaatattgtgctcaaggttttaaaaaaatatgtgcaaccgcaatttcagcctcagtgtcaaggtttttggggtcattgtgattaatttttaaccatctgaatattgcatttgtatgcaatttttcataatatcaaggattacaaccatgaccacaatctaaaacctttattgcgttgcaattgtagttgtggtttgcaatttaaaatcaattatatgtattgacatgttttggtcttatgctttttttgtgtcatctaacaccaatttttttctttaaatgtgtttttctcaacaattattttctggttttagcaagcttaacaaattgatttcagatatgtactttgtaatctctaccttcgtgacattatcatagtttattggggctagaatatgcgcctggttattggtatttttttaaaatgagaattggcttggcagagactagttcaacatcagcctacacagtatccaacatcagaggagttgagtattgggaggatcaagtttaaagcttctgatcttgagggtcaccaaattgcacgaagagtctggaaatattactatgctaagttctccctctcctaacacagacacacatttgtgcatatatttatgaagtgcaccctaacagttgacttctcaactctgttttgcacctttgaaagcatcacttgatggaacttggctatatacctataagatttgtttggaatttaggattaaatcttactcctcaatctgatacagttttagacttttggtctacatgctaatattaatgtgtggtttgacttggaatatgtgaattttccgttctagctgttaacaaggataaagtttggtgtgtgcatcatggcttttaagaaattacatgaatatttggaatgatttggaacttgaaatgtgactatttttttctttttattttttgaattgttgatgcaatgatgctgatctaccacctgcagactgcagttttgctgcctttgttgttcggattttcagccacgaccacgaccacttcctattcgtacggtaagaacgcttttttatttattttccgttataatcttccaaatattgagtgccctccctcattaattttctggatccgccactgcctgtaaagataagaaaaagatctacaattttgtcagagataagctaaggtcaattctgtcattttgagggtcatttgaggcttgaaagtcagaagctctgcacttgaattttggactgcgagttacatttttaatggtgtaattagcataattctagtgaaacactttggcattgtgtagtagggatctcatatcacaaaagaaaaaaatgaactcatttggtggtctatttggtggtgctcaaaaggccaaaaacatgcctttgccttgcatttgctctcttaatcttggtactggacttctgttttctttcacaggtgcaagaatggagacaaaaagctctttcatctttttctgcagtctatcaagctatatcagaaaaaaaaaaaaaaaaaaaaggtgcaaggattgttctacttataatgaatttagtttggagataaactggtttgctaagcatagttaaggcctattttattagtaattttgattctttaatttatatacttttaccctagactcatgccaccattatgtgaagctggaattccaagggtgtgctatcattgaatctttagtatcaatacttgcttgcatataaatcaggcttacatagaggaaatatttggtgctttgtttaacatttgtctcctgctgcagagtccttaggtttgttcagaagtacttgttaaattgagaggattcattcagagttctagaccaacccaacaaggacctgctgtcaatgtagatttctcagtaactgctttcaatgagagcatatcagcataggagttccatacttgcagaaacgccttgagtaatatttgcagtggagcataaaaaaattgaagacatgtaatctttgaatttatcaaatcaattaattctccatttaaaggatacgcgggctaatcataatgcatttctatccgtatatttcttttctagcttaacgaaactacaatgaacttcttagaaatgaggcaaaatgaaactaaagagcaaccaattcatactgtatgggccaattcatactgtatggcaaacgatgcaaaggctgcatttacattctgctcaagtatatcacaaaaaataggtagagaacttcgtgatattcattcattgcttctggttattccttacagggaacctaacatttcctgctattgctctacatacactcatcatattgttgcgaactatggatacactatcaagtctataactctaaaccccttcatctagagacaaagtctctgattcaaaaatcaatagaaatgctccattggtataactctttctcaggtactctcaaatcaatagtcaccaatccagattcttcctcatacttgaattctacttcttctgaatcaactattatcaacttaggctgagctgatgaataagcaccaaattggccacaaccacggactttcatggctatatttgtactttcattagatccccaactaaactcttggacagcccctcctgaattgaacatatttattaaaccaataggagcaaatttgacaccattgctcaattccttcacgggaactattgtgaaaacttcatattctctggttttcaaggtaactgggatggatgcatcctttggaaggtaaaccacttctcctgcaaattgacatcataaaaagaccattacacaaaagaaaatttgggttaaattttgtaatctttacaagtatcattgtcaagccgaaaaacataccaccaagatgggaataaataatggcatctcctgtccatttatcatctgctaccctggataaatagtcaacatctttagccctaatgacacctgtgacaatgcctggattctcatcgtggataaggttcttcttgccaactttgcaccacccagctccttggcaattgaataccgcaacaactccagaaaaatcattcatgttccaaatcttcagaagactgcaaaagcagcatacaaggagttaagtaaaatacaaatataaagaagcatgcatactatattttgtagtagagtgtaaagagtaagatactacatcaattggtcaagtatataactatataggtagccaaatcattttggattctttacctctttccatctctggcaggatcagtaaataagcaatcctttgttggtcgtcctggaagtttagcccttaatatagaaccatcaggtagtgcaagcttcttcaaaagaccaaagtcatggtgtccgggcttgtcactgcacaatagaacaacatccaaaggtaagacatcatttatcaaataaaaaaagtactgaaaaaaaaaattactacaagctctactcacctgacataaattggacatccccctacagctcgtgctgcaccatgatattcagccattggatgtaggctctgcatattgcacaagaagttaattagctcctgcagaagcaagttcatattttttttcatgaaaaaagaaggaaggatcctgtatttggtaacttacctgaaacatatcccagtctggctgcataaattcaccaaggaaaatagtattgtaagccactgatgcaatgtgaatcgtgtgggatgcagggtctcttggccagaaatcatctgatgccctaataacagctgaacgctttgcgctacacaagtaaatttataaagaaaatcatcatcatgaataaaaaaaatctattgttattgtgttaataaaagcattcactgaagttttataagcaatccatacctgtataatccatctgtgttgtgactcatgcaacaaatgattccattgtcagggaagttcctagcgattgatgcctccaatgcctggtggtatttccttgcaagtttcaccctcccaccatgtcctgctccaagagtttcaaggatattctgaacatcaactttgacaccatcaataccagcagatgccaaatatgagtggagttcatcgtaaaaatgaaaaactttctcaggattcacaaggccgagcccattgatggcaattgttgtcaaagcttcatctggttgatttgactcaactccaggagatgagatagggaaggccatctttgattcgtagtgctccatgcccggaaccccgggtttaacacctccccaatatcctgttattgcatgccacacatatacatgcctgggaaagattttccaaagatgatcatgagtactatgtgtgaactgaatatcttatggagaaatagaaacaataaaatgaaaatggcaatactttatattatgctctagtttgatttcattggtcatatgacgaagtcccaaagccgggtcctctactcgctgaccttccttgccatctttctggaatttgtgattctctttgatgtttgttaagcgatttgcaaagctattggacaagaaagcacaaaaatgaactgattcaacaatgtaaaatggatggaattacaatttgataatgaaacttagaaaggaagtacccacttggctgaactatcagatttccattcaacaccattggggtccatcccaacagattgccatccatcatcaattataacaaacttagcaggaattccacctttctcaaagctgcaaaaataaaaataaaaatgtaacagtcacaaatttatgtgatgcggcatatctcataactatgtccattgtccatggaaggaagtaccacctctgcaatccttgcttcacattctctgaagtgacattagtgtagaaagcatcccatgtacaccatccaaaccagttcaacatatctggcatctgaatataagtgggggggaaagtaaaattagaggtagtgaactttaagatgcagtgctcagaaataagactgtctatggaatttccattttagggagggagaagctatgtaccttctttcgctcgcgatgtgcaaaggtctgtaagtgtttctcaacagtcctaaaaaaaattgcaaaaaattaaaataaaatcaataacttgacttgtttagacatataaaacactgcacatccaaacgtgcagttatgttaaaacaaaaatattacttcagaagattaaactcaatttttgtaataactaaaagtcaatgatcccaacccgaaagccttacttatagatttcgatgactggtataaactaaaaattagggaacaacatagatgaaatttattgaaaggtggtaactcacttgacagaatttgttatgacttcaaaagggtcggatccaaccccaatataaaccaaatgagtcccatcaaattcttccacagcaggacaacctgaaatcagatacaaatttcatcactttgcacaacagcaaaaaaatccccacatatatgcgaataaactaatgaattttttcttcttctgaagatcacataccactttccacacagatttcaatctcgtcttgatcattcccctgaagaactgctctgaaatctccttccagaaggggtaagaaaactgcataggtagcagcaccttggtctcctcctccttcaatatcagagccactgtgtgcttcaacaagcaagaactgcgtctcaatggggatttcttgtccgcaagtgcccattctctgcgtcatccaccacatcttgaaccggaaaacacacataaatcgcaaccccctgaaaaaaaaaaaaacatcatcctaggatcagaattgcagtatcctaaaataaatattattaactatgcaccaacacacactataagaaacatcaaaagcaatccagtacatgcacatgcacttcctgattgtgacaagcaacaacaaaaaatacagcattcacccaaaattacaaagattttatttttcaccaacaagaagaagaagaaaagaattgaaaagagaaaagtgaagagtacatactgaagcttgccaattgggaagactgtgcggctacccttgtgatgggattgaaccccgatgaatgccccattgagcaaagcaccaccacatgcaggggaaacaagaaccttgtcatggacatggctcagcactttgttccccaacaccatcaagttcccatctgcaacagatattcctgcccctacagtcatctttgatgatttgatgaatcaaacacaagctcaaaaggaaattgcagcacacagagcactgcaaccgctctactgttgtttgttccaaatcaaatccaaatgagtcaatgcagcatgggaaggagagggaagggtatttatagcaacaggataatgataatatcacgtaaagctgtgtcagcagggtgcccaatttgttaggaactattgccattattgatccataatttatgaattatcaacaccatgcaatcaatctagccactcccagactaaagtctctctcttttaagaaaatttgctgctacaaatattcatgtggacatatcttatatttatcatttatttacaacatactttgtatttatttatttttgtcttttgtggttaaaacttaaaagatcggctaatcagaaaggtaagacattcaaaaacttaaggacattgcaataacacatctttcaagtttcaatgacaatcttttttcattatttaaatagtgcaccgattaatcttttgttattacattacacgtctcttatttattatagattcgtattgcaaattgcactattatacaattcgtaaaatatagtaattgacataaattatctctccaattattgattaagaggcatagatattttgtttttaaaatcgtacttctttatgtataaataatacagtgctatctttttttaatgaataaactaaaataaataagtaaacataaacaataaataaacttacggtaattattctccgaaaaggaaaagaaaataaactttatcagcacacgtgaaagcacaggaaattgtgtgtgggggccacaataatgatacttgagatttgagagtcgttgattcgcagagtggatatgataaggccattgaggtgtaggtggagtgacgcaagggcgaagcagcatatcacaatcagtggaagaaaaatctatgcgtcgtgagtggtgaaatgacctacgtggcatatagaagatggggtccacgtgacgcctatttcaagaaaaatcgtttttgatcagacaaaaaaatccggtaatcgggtgaaaggcgatgaatgatctacaacgaaggcacacgtgaaccctatggagtggcgtcagtttctctgatattttatagtgcaatttgacttgaggctctgctgtgcatgcatttcacttcaattcattcaatgtctttgcatcctacattgattttttttatgcaacatgttagattcattaaacaaataaaaataagaataaatggattatgaatttacattgtaaagtagtagattttagtttatattatttaatcacaaattatatataataaatttactaattttataatattatttttaaaagtcatgaataataatttctaattaataatataaaaactattttatattttatattgtgaatacatgactaaattctaaaataattgagcaatgaaaatacaggaatggttcatgtttacaaaaacgagtagtatgacatcactcagaacaatatgcatgccagtgacgtggatgataagattacaactcgttcacagctcagatctgacttggcatttgtttcctaaaatttaattgcatagattaaaagactaggcactaacaagtgtaaaaaaattagaaaaaaagactatcatctaataaaaaattataacgtgggataaatttcttaatttttataatatttgttttacaaattatattaataatgattttataaatttattattaaaataatagaaaattattttatattatctatagttaatcattaaactttattttttattttaaaaaaaataaagaattagatatttttcccattatattttttaatgaaatttcatatcttccctttacttttttctctctcttaaactaacagaatatagataaataataaacattaagaagttatcaccaaataccaaattagttggatttattatctaaacattcaaataatgagcgatcaccccaataaaaaacttcaaatacaaaggacttgaacaattaaattttttaaattatctcttagtattctttattaaataaaaatattaaacattttttaatatttttttataatattgaaattaaaaatatataaaaggatacaatattgtaaaaattgtaattgtaatagtaaatttagttattttgaagcttactccattaaacccgaacattgcgacgctttcacattattagccgtaatattgttcacctgaactaaaattatttcatttcagccatttatttataacatgagttaatcaaccactgaacaaaagttgattgagtaaaaagtaaaaacttaaatggaaaatattcggctatgaaattataagtttagttttttataattttaattttatgattttgatttctttatttataaatcaaagtaacttaattttatgtgttttcataaaagataataaattactgagataaatattttatttagttaattttataaatattttatatgagttactactaaagagttattttttttttccaacaagtcattggctcatttcttttagacaacttctcgagtttaagttttctggatgaaaaaaatgtagttgagaaaggagacttcaataaaggtgatcagttaggtttctcaatcgagatttgccattaataaaattagtagatacttcacacaaatatcatagtaattaaaaaaattattattttttagaactataaaaatttataaattaaaaaaaattaatatataaatatttttaagtttatttaatacaattttatttttattttatcaatttcacaaattaatatatatgttattttcaaaaaatattttgtaaatatatttttatgtaaaaattatttttaatatagttatataaatcaatataattgcatcagttaatatttaaattatataagttaactaaatttattttaataagtaaatctttttatttaaattatgcaaatttatttttatatataaataatacaaatatcttaattataaaaattaataaatttttaatttttttagattatttgaatattattttaaatttatgtaatttgtataaattatataaaataatttttaaaatgatatatatattaattatgtaattttaaaaaatattataattaaacaagaataattttttatatataataatttattaatttatattaaaataaaatcttatgagaaaaataaatacataaaattaaatgttaaatactttattttaatatacaatttttatgattttaaaaaattaatagctcttgactaattatatatgtaaaagaatatttatataactgactaaacaaagtaagtgtcttaataatttatttttttggtttttatataaaagattatgtgttcaatttctacttttattttttactttatttaatcctttgtcacataagcgttgagttaacggtctaaataagatgattaaatgtatttagagactgaattcacgaatgcaaattatagaaaacaaaaataacaatttaaccttaacttatcaaatatttatttgtacttaatgcttcttttctaagttaaactactttttaagttttctaagtcaaataattaatctttgttaaaaaaatgagagaattctgagtcaaatttcattttccctttcctttccttttcaagcgttgaacgacaaatttgataaattctcaatatttgatcatcgctcacatgagcaaaaaaagtagaattaatcgcattacaaatactcacctcttgcacttatttaatcatacttccaaactctacacagcacacgctcacatatacattgtctctaatttccttgatacaatttttttcccttttctccttttatttttgttcatgttccaactttttgtcatggagttcatatatcatgatttccaaaaccaaagaactccatctccaatatcacaccctttttccacaattgcctacatttctagatgcttattataaggtaacacttgtttttcttcacgttcctctcaagtgatccatttgtgttcatgtgttgttatttaaaaaaaaaaaaagtttggtaacactagtttatttataggttgtgcgttcgcaccaagtgattttcctgtcaatgtttcaacacctagtgtttttccaatgtcaatgttgattaatgtcgatgaagcatttcaacgagagttgaagaatgaacaaatatgatgatagctggagaatgatattcgttgacgagatgacattagtctgacaaaaagagttataagagaaaattatgaggaaaacgaggtcggagaaggcgttaggcatctcaatgcaaagacaagaggcaatcttggccccaaaatgaattttgatgtctttgaatcaagattgttggggtaagaactctaacacatttggtgttccaatatataagtggtcaacaatataatgcacagacttaaagggatcaaatgatcacactagttagtgtataattacgtatcccaatgtctggaggcttcacactatgcataggtaagggagaaagatattgtatacagtcttatctttgcatatgcaaaaaagttattttcagatttgaactcatgatcaacaagtcacaaaaatacaactttatcgctgtgaatgttgatgcaaagcgcaaaatagtgacacttcgtgtcgttgataactatgagcatttgttcaattagtttacagaagaaattttagcaagagtggggttgcacgctatgtcaaattactgtgaaaagtgagaaaggattaaatgatcatttttcacagaaaaaataaaaggctcaagaaacatccctgaaaactaaaaagaataggcaaggacataaaaaacattattatggttaaatgaaaattaaaaaaaaaagtgtgttaaatctaatgaatttgttgttcacatgaattcaggattgggttcaagtcttgattgttagacatttcaacaatggcggtgcttgagataaaagtttggaagtgtctaaataattaagattataatatatttcattttgatgtagatttttatctttaatttttattatggggcgtaaaatgtacatctactagttggcgagaccttatgatgtatgagatgtctattttgtaaaaataattaattatttttacattgtaacccatttataaaaattaataaatattgtatacaataaactatataaataatataaattgattatattcttgtctaaccttcaatgttatttttaaaatatttgtacaaattattgaatttttattgattttaggaaaaaaaaatcccatgatagatcgccttataatttagcatttttatttttttgtctttgtaatttattttaatttcatatttttttatgtttcgtccttaaaacaatttaaataatgctttaaataatgaaaaatattatttaaatcacctaaatgacaaaaaacaaacataatttaaaatgactaaaaccatttttatcaagttagtagaacaaaaaatgtttaattacaaaaatttaaaaagtatttaaaccatattattattattgtaattttacatatttttttaaaaaaacttattactttttggtgttgaaactgtaattttacaatgtgccactcaatgactgaccaattcaaatatttaaattttgtgattatataacccaaagcctgaacatttatatgatttaaaaagaccgcacatttataataacacttactttaacacaagtagtgcccagtcaagttaagaacaccaccttacaacagaatatgcaaataagagcaaaggtgtaccaaaaagaaaaaacaaagcaacccatgcatctaacaggttctcgcatctgtgcatactagcttattagttagagacaattaatcagttagatgaaattaatataatcttatagtatttgctgacattttaggacaaaggctatctattcaagggtatcatctgatgagtgttggagtaaaggacgagggtgtcacaataatttgaaatgttgcatggacaacgcgagacaagagttaggagaaaaatagttgtcaaatagagatagagctgccacatgcctcaattgggtgatacttcaaaattaatctctcaaataggaatccgtacacccacattgacttttttgtgcatgattattatgctagattaatgcttctgatatatgtgatttcgtcgctggcaatgcaacttgtggaatttaatttaatttcaaaaccaaaatgaatcaagatttgactcgtggatactgaatgtgaatgacttataatcttataccaaatttatattagaataaagagaacttcccttcacctttttgttttttgtttttctaacaaaaatagttaccgtatacgtacctatttggtgagtagtacacggttcttctctgttaagcaactgggtttttttattttttattttatcagcgttaagctactggattagtgaattatatgagcacattcaccaaaaaaaaaaaaaaaaaaagtgaattatatgagcacgttgattgtgatttaccagactaatcatgtcaacgacgcccacagtaattgagaaagtgtcccggttctgtgctgggctacctcactcttctaacttctgcagttgaattttcaactgcatcacaataagttaaaaattattcactgctagattcaaaactgcatgtacccgttggtccatttgaactgccagtgatcttgatccctagtgaattatcaatttaaatccccttttcccttttttagctggcgccaaaattaatttagtacttaaacatgctgatttttttctcaactcgtattagttacgatgccaaaaacttttccttctatatcactattctgaaagataacatcatatcttctgtgagagaaatgacaattacattttttttataattgacaaaaatttattgaaaattatcaattttggtgaaatttatttattatttaatgattatttctctttacttaaatgttgaatccaccaaaattgataataattaataaaaaatgttaatcacagagaaaatattgagaagaaaatgttacacaaaatatcattaacatttttctactttatgaatataagatcagtttagtgttattcttcccctttatgctcaacaacttaaatgttcaacttttaatatgctattaaagatttaaattgtttaacactgttgtacattagatggatcaatctatataatgagtacattaattgcaattttaggtgctaatggcgaacaaaatttgcaagtcaaaaagatttgtcaactatataactcaaaaccttggtagctatgccttttattatattttatcggtacattcttggtgatagcatgaaaaaggcataaggactgccatataatttgcaggtgcaatatatgaacgcaaagcacctgccaattaaacagaaaaagaaaaatattgcacaatcttgaattcaaatacgaattttaaatatcattattcaacataaattgactcctgagattcagtggctatcagcctatcacgcggaatcaaacttcaacttcgttcataaaaaaaaaattaattataatttttgtatctccttttttatatttatttcacctccacgactcactttattttattttccctggttttgtcgtacccacacgcatctcattttccttaacacgttgcgaaaaaacaattattctaaaactttctccactaaaaaaagacgacgtggtggggcagcttctagaaccttttgcaaacccaagacgaagttgttattgtgcaccaacaccaatacctgctgccatttaaatgaccactatacccttctctcaatcttgtgctattctccatctttgaccgccatataaaaacctctctcaactctcatttcactgcacaaaacaaagctaaattcaaccaaccacaacaacaaacgcaacattttcatttcccattatacccctcatcgcagaagacctcagaaaatatctcaatggcgggaaccctaaatctcacgcctctcaccggtgccggcaggactctccggccaccggtaaggatctcaattcgggcattcacggcgacggcgatcgattcccggcgagcggcgagcctctacgaggtgctccggatcaagcagaacgcttcggcggtggagataaagtcggcataccggaaccttgcgaaggtgtatcaccctgattcggcgctccgtcggtcggaatcggacgaacgggacttcatcaagatccacgacgcttacgagacgctgtcggatccgtcggcgagagcactgtatgatctgtcgttgatggcggcgcttgatggtaatcgctcgttgtcgtctgtggtggctgctccgaatggctcttccggattctactatcagacccgtaagtgggaaacggaccaatgctggtagatagcttccaagtagaagaaaaaaaaaaaacgagaaaatatattttctgacattaacaaatttacacggaaaaaaaaattaaaatgtagaaacgaaaacaaaaaaacgattctgtaaattctgtctcatttttatgtagtgctgctcccaggtcattttgtccatttcgtttgggagaaatttctgctgcaatttcacaaccatacgtctatcggccaccaaaaaactttccgtcgacttaaaaacaattaaaatataaacacttttggacctttgccacaaaatgtattacgaagtcaaagtacaaactaagattttttttttttttaaatagtcattttcatattcatcaatatgagaattaacaattttattataatgaaaatttaaattttaatatttgaaagcgaaaaaagtgtaatttttgattggttattattaatgaaagagattaagtaatacatttaaggagtgctttatatattcatagaccaaaataattatttatttaaaatataatttaattttcatctttttataatttatttgttgttttaaaatttttattgtgataatattataaagtaataaaatcaagttgagttttatttttttaggattaatgtaactactatacatttttgtttgagtctcatattttgtactataatattagaaatttcaaaacaataaataaattatacttattaatcaatattatgtttattattatgtttgttctaacatgttttttattaaagtatttattgtaatagtatgattgtaataattaaacaaaaaggagagaatatgagattaaattatattttagataaatattcattttcgtcttgaatatgtaaagcgttgacaatctcgtatatgaatgtgtcaaataaatttttggggactaaaatttaaatttttatcttttaagaatgaatttatcaatattatatatatttagggataaaaataaatatgaatatgttagatgatataaattataaaaaaaacagatacaaagaaaaatggtgtcaatgtaatgtatatactaatattataatgtatcatcactttatgaatgataatatattttactcgtataatatattaccttgttagtttagattagtgaagcttgtgattttgaactattttcacaaaacttcattaattttgtgattaagatgacttattagcgatttaaatagcctaaataatacatttctagtaattaaaaaaacacggagaaataattgaaaataattattagttcattagaagtattctattctatacacattatgtgggaaccgatttgtcctactgtttcttgcaattgttttttcttttttccttcttatttattttttatttttttagaagtattattagtattactgccatgttagcatctgatatacttggtcaaaggttggtcgtcgcatgaaccatttttatggatgtatcattgctaacattacaagcaaactgctgcagaagtaaaagcacccttccttggctcaaaggaagaggaatccagagagaataatagtccatgatcaaaatatttatataactatgagaaagttcaaacgagagaaaaacacagagcaatactaataatcacaagagcttaaactgttaatattgaatattaccaggcttgaatttttttatttcggcgttggaaaactcagtggatcatgtttttgggtcaagagtaggcttaacctgttttgactacagttgtttcattttacgtagcaagcccatattttatgggcccatataataatatttcagctactggcattagtgtccaaaagcaattagacaagaaaaagaaaccacggccattagttaatactactagttatgttgattgttgggaaaggtgcgttaaattttcaatgcactttttattaaataaatattacacaaatcttaataaacgaaattttattcaaataaattaataaaactcgcattaaacaaatttaatagcaaaaatactaattgtttttcataaatgattggagagagaataattaagtaaagatataaaagaaaaaataattaattcatttaaaaaatatttttttataaaatagataaataaatttttgaaaaattcttataactaaaaacggaagtaataaataatacgtttgtgactactttgttgatgttaatactagattataaaaactggaattgatgattggaaatggaagaaagagacgttaaagtatagcatatgggggattaagtaagtggttagtatctttcagtattaacaacggtcaacttcagcgtatggaccaatcaccaaatttgtagcctcccaaagcttcttgttgtaacggactcaaccacttcaccactctcctttaacgcatcaccttccacgtttcccatgaaacttggcaacaaaacgttcacgttttcgtttttatttatttattataacaatgttattttttaaaagaagaaatattgatgatttcataaaataatcctcacttatacatatttaaacattgtataaattacaaaatagttatcaaaacattttttaagatattgaattcgaataataataaaaaaaacaaaaacagaagcctaaataattttcactctccagatgaatctattcaaattaacttaaattagtggttttttatgcttgttaaataattccctcatccatataacagttgaaactgaatatcaaaagttaattctaaatatatgtattttgtcttgaaaatttaaatatgttcctacactagttactatcttataattttaaatacatggaatgaattatcggttttacttatgtgatatggggcatctaaaaagttgagaaaaagataaatttcttttgttccttttattttattaaagggaatcttgttttaatggattagatagctttccttataagtgaacaaaagcgtcaaatcaaaacgtcttgaattggtgaaagagacaccaatgttgcctccccttccttctatttaccacttttacacttctttctatttcccttttcttttaaattccgcattatctttctcaattttcccaccacctcccgaacagaatcagcacccgaatttcccagatccgagatacccagaaggaaaagattaaaactttggttttttcatcgatctctggggaaagatgtgttgtggggggagagtttgcatgctttgcacgtgtctggttctggtggtgatcgccatcgggttggtattcgggttcggagtcttcaagcatggattccacaagatcaaagacactgttagtttctgcgattcttgcggcggcggcggaggaaggcctttcatcggttatgcaccgccgccattgttctagttcacagcatcctcttgttctatttccttcttgttaattgttctggggatttgtttgtttcttttttataaattagcattcgttagcgttcatatttgtaattacctgtttcttgggattcatgtttgatttaatattcatttgcctttgttacaatgctgtcactattttatctgtttcttttcggggtttcgagtttggttttataattagcgaattgcagaatccatgtttagaaaaaaaagtaatatttttcatcaattaattatttgaagaaaaagctcaatgcttttctaattatttttctttggaaataattatgttaacatatagtaattgaaaagtcattttgttttaccaatttttgtcatcacgttaatcatttgctgttcattcaaattttaaataaatagctttttcttttttgacagcattaaataaatagcttttgtttcctaatttttgaaacatcttattgtctaactaacaaattgatgatacatcaaaggggtaaatgccgatatttgaactatatttagttcataaatttgatttttatctgaatgtataatcaaattcagaccatcaatatgtacccaaaaaaaatcaaaccatcaatatatagttatatactattgaatctcaatgaattagcccgaagtgagagcaagagattcgagagaaatggatatggataaggattcggattgcatcgcacttcttatgtgaggatgaagattttcaacattaatagaaaaaagaattacgtggttatgtctctctgtttgagtcgtgctccacatgtatagactctctggttaaatcataaaaaagaaatgctctttggttaaagtgggttttgcttgtgatggttttctacttgacttgccccctaatattcgtactttgcgtgtttgacataattgattaatcaaacatgcttgattaatggtttgaatcattttaaccactacgcttgttgatactagtatgttttttttgcccccagaatatcctctccaaagcggcgacatattgttcggatgttatcactttttttttgcgtagagaaaccaaatgcaattaattctagagaacaagaaaaatagtttattcttccttatttcatttcttttgaggggcatttcctcctgtatatctggcactagctatcctatcgctgataatgtagaattttttctacaactcagataaaaaggtatatatacattcttataaatcagatttttcataaattttaaaataaattatgtgatttatcattaattttaatggtaatgttgatgtagtttagttttggtcgtaagaaaacaaggggccacaaaggcctagagaaaaaggaaggaaaggataaggcgacccaacccaagagttataatcaattacaatccttaagcccaaatctgaatagccgaaaataagggtgtgccatggaccaaaagaaaagcttgggaaaatgcagcttggataagtttgagtgaagctggacttggattcttttagtaagattttggatatacaaaaacatgatttaaatataaaaaataacatggtttaacttgaataattggaaaagcctctgaatacacaaagcaaaaagatagggaaaaataggagcatcctatctaatacctagcatgggatcaaactcctggagtagctctccattccataacattttcatactgggggaacaaatacaattccaaagaatatcaataaacttggccgggcaaccaatgtcatacaaagtatcattcccaaactcccatttcaagcgttcatagactttctccaaatcaattttaatgactattcaccccttagctcccttcttctttctcatagaatgaaaaatttcttgagcaatcacaatattatcagtactctatctattgggaatgaagttgcagtaatacgggcagatatatctttccataaaaggcctcaaacaatgagccaaaatctgtaattattttacaggagacattacaaagactaattaaccacgtgctccactttaagaataagagtaataagagtttcattaacctcagcaatgacatttggatcatcaaaagccttctgaatcatacttaccacatctctcccaactactccccactcactaattttcttttacatctgcatcactgtgaagaatgaaaaggtaaacaatcaaatcataaatcgtttagatatctgcattaattattaattaaagaataaagtttattgaaatttaacggaataacatacatacataaataccaattccatgcgccaatgttgaaagggttggatttgcggattgtggaagacgagcacatgtagtttccactctgtatgctgcatagcataatcgttgttcatcctttccttcctatgatatgaatcatatgataagtgttgaatgtcttatactttatccaaaaatgttagtattgttatattatttcacctttcctccctcactctcactctgtttctctcagtaggtattaaaatatatataaataaaaaaatcaactcaactcaaatcaattgaactaaactaatatctagggacggcctgtgcctaggttcaagacccgttgctggaaggaaaataaaactgtttagggaaaggacacacatttttatgtattttttttgaaaaataagaatttaaaacttttgataatgatgtgagtttatccaatattaaaacataagaatatcagatttttttttcatttcctttatctcataaaagacatacatttttataatgaaaatccaaatcttttcttgaactataatgtgttatatttctataacaaaaataatatcatgcgttagacagcgggggaaaattactcttaagtaggataaattgatgatacacaacttcagaataaggacatcaccaacaaagagggatttaggtttaaaaaaagaagatgtaaaaaagccaaaggtaattttgaatgagatatatggaatataattatcacatttaaaaattggtcaattcaaacaataaaacctaataaaatattacttcgattcacgctactttctttcactttctatcaacattcgaagcaaagcctactcgttaatacgatgtggacaaagacttagactttgtggaacataattcttcttgtgatcaacgttaacttttagttctaatttccaggtatattcaacgaaaggtttcaaaccacatgttccatgcataacagtcatggaacattggaacgtaacccaggagaccttggcgataattgccccacaagaagaatgaatcaccattcaccaatgatcgataatatccaatgaaaaacagcttcactttacaaaaaggaattatcaattatgttattgagacaataaatctttaaatttaattttaatatatataatgttagcatagaaaattaccatgttatgataagaaaaatcatgttattgatttaataatgtatcattaaactcattaaataatgtggtaacacattgttgaataacaatattataaattttgtatactttttcttttttgttgacaaacaagggattgaggcacccctggaagaagattaatatacttattaatttaagattgcaataaatataatttttaaaaaataatatacttattaattaccgtacttaattaaatttcagcatcattattctcttgtatttcgctatttacttaatcataaaaaaagaaggaaaaatgacatgaaagaaaagaagattgggcagagtatttatgcggataagccaagaaaaatgaagagcctgagggagtaggctcagacgaatgcactaaccaattgtaaatcgtaaaggaacaatatcattatattcagcaatttaatcttaaattattttcagcaatttaattctaaaatctattaacttttctttcaaaattttaattttaaaaacttataaattatttctaaaattttaattttacaatgtatcaaatcacttggaaaaatgcaatcctgaagtagtttataaagtacttttgaaaatgagtttacaaatcacttctagaataaaattctagaaaaaagttcaacatatcttaaaattaaaataaaaaacaattacatgctaatcttaaaaccattatgaatggaaaaaaaatttctccgagtatttaatataatcgaatattcactcataaaaataataattgtattttcataactcaaactcaatattttttattaagttaaaaaaatctggtgtcaattaactcacgtgatcgatgattacttttttgtaattaagacaatacaatctcaaatgtttataataataactatcagttatgcttaactagaaatatttttttttttttgcttattcaatttataaaatcaaagaagacaaatatcaaacacatattatgttaaaatgtaatctttccattgtcattttgaagttaaattaacacattttgaatttttatgttgacttcaacatttcattaaactcgttattaaaataccaaagtctatgaatcaatataaagatgcatcaatatgtttttttgtgatttcttggttaatatatatatatatatatatatatatatatgttttctcttgtaagttgaaaagttcttctcatctcaataacttatgtgtatgatactacctctttttatttatttataaaaaaacaaactatagtgtaaaaataacaggagtaatagtaattataactttttaagatttcttaaacaagtacctattgtgaatgaatttttttataattctcaaaatcgcatctcttaaaaattaaggtgacacacttaccattagtcagaacacttcatttgtcaatttcttgcatctcagaattatacacttaaattcattaattgtcaaatagtttaactcagcaaaatagaatgtaaattgttgtaaacttttaatacttatttgtctttgatttctattttctactaataaaaaaaataataattagtagttaattacaagtatgaaattgacactcccaaccgaatctggcccaaatgtggttttgatgaatcgagtaggcggcgatttggtcggttctagctttctaggaaatggggaagtctaggaagagaccatcatttgtggagggagaagatttttttttttcatggtaatttgtgtatccaatacagtactgtagatattccgtaaatataatttttgcaaatataaatttaaaaaaaaatggacaacttttgaaagaaaaatttattcccacgagcaaacacaagatatagagaatgaacgtcacccatagaaggaagaaattttctccatgaaatacttattattagcctataaaaaaattaaatacttattatagatttgtaagctcttctacttgtctcacgtctttctaatttttgcatcatttattatctctggttttcagtacataacacagtagttatatagtacattataatttctcatcccaaagtcttaacatgatttgagaaaaaaaaatcaacttgcatacaatcaattttaatatttagcttttggttttaggtgcttcaagttatcattttcccctattaacattatataatccaggcagcaacttgcttttaaggaccttctcttggtcaaatagaatagaagaaagagcactagttaaaccatggtataattggtatacacgcataatctaagcccttaatcaaactgactattctcatttacattcacatttgacaaagtctaaaaccattcaaaacttaaaggataagaaatcaacaaagtgagggagctctgttgaagtcattcttttagcaccttcccaaacgttgccgcatatataccaaaaagcataaacattaaaaattaagacatcaatgtggtgcaactttagctcacctgtgtcaccttttgataataccaaaaaaaaaaacacattgtcccctccattattattactcaactacaaaagcttttttttttttccctcttcacttatattgatccatcaccccatttagaataaataaacatatcacttctatctctccctcattcacttccattggcctattttagtagtgcaccttttcaaacatgctagcctctgttgaagaagaacttggcacaccaatacaaccaaggaatcaacattctcagcaatcagaagcaccaaattcccttgccaacactagagcaattttcgggcaacctcgacttcaaaggacaaaaccaattatatggtgtgctgcaatactgtgcttcatattcagcctagtgcttatcttctttggaattgcaacactgattatctacctttccatgaaaccgcgaaaccccacgtttgacattcccaatgcaagcctcaatgtggtgtactttgactcaccacagtacctcaatggtgaattcactctccttgcaaatttttccaatcctaacaggagaattggggtgaggtttgagtccttgaacattgagcttttctactcagacagactcgtgtcttcacaaacaatcaagcctttcactcaaaggccaagggaaaccaggttgcaatcagtgaacttgatatcaagcttggtgtttttgccgcaagatgttggtgtaaaacttcaaaggcaagtggagaataacagggtcaattacaatgcaaggggaacatttaaggtgaggttccatattggccttatccatttatcttactctctgtatagcacatgccagatagagatgactagtcctccagctggtattctagtagccagacaatgcataacaaaccgatgatgaagagccaacaaacatgatagaattctttgtggtttcttattattttctagttttctactttattaattaggagatatagctaatggtaaataccagtgtgcaaaacagtgatatgattttttttgtgagaaatgaaaaagagaatattagaggatatatatatatatatatatacacaccatatgattttaattttgatattttattgtttttatttgtagatagagacttgggtggaggggtgttgaagcccttccataccagaatatgttgtgggtggagtttttattttatcttcatctactagtttgttttccagaacgcgcttttgctgaattaactttctgatactgttttcttttatttccttaattgtgtcgtgtcagctgcactaattggaatgccttttgactgttaaaagcagaaaaggacttgtcagaggttgatcattgcgtggtatcaactaagatttcaaaagtatacatacataattttattgtggtgagccttacatgagttacatcccaaaaccatgtcttaatcagaatcttcatatatatgttcgctcaaaggccactaaagcatatgcggaatatccattgctattttctttttatacaaaacggaatatacttgtattgttagtgaccatgaccagttacccaccaagacattactattatttcaggttaacaccacaacggattttgagctatcaaaatagaattttgtagaaaattaattatatgaattctctgaagctaaaccattaatttatagtaggtgcagagtgcagagtgcagacagtaactcggcggtacaatgataattgatgaatgtccatttaagcatatatttttttctttttttttttttaattccttttgttctagcttctgctaagaatgtgcgacggggaaaagtatggccctgtatgggagctattactatacggattacggactaatatgatagactgctttgtatatcatcctgtgttaagtaatttcacattttataaagtataatataatatattactgaacaggaatcacggattggcgttcaactacagagaaacaaacacacttttataagcctaatccttatagttcttggcatatacaacctctcagaagccaacccacttccgcttccaccaacatacttccccagagtagcctcggaattggtaatgttactctgtcacacttaaaaggttggcatgcctatgtttcttctcaaatgccataaccaacctaactatatcgatcccatatcctgtaaccaccagtttatctctatctgctccatttagcgacactgacttcacacctgcgcatccatgcatgcttcccactgttagcttaaccaaccaagtacatgtatacctagatattcttggtcataacataaatattcatggtgtaattaataataagccaagcaagttattttaattaataaaacaaaataaaggtaccctttgtcactgccgcaattttgagggccttccttctgcatccatcacagtccatttgcacctgtataactatgttttggtgtaaggtaaatttaggcctacgaaaccagtatctccagatttgatacttgttgattgcgacctcacgaccatgaacaacaccaatcctgttgtcaagtgagaaattggtggtggctgcttgaagctcagtttggctgaataattgcgcagcagcagcaacatgtcctggctcagcaaaactatggacaggggatgctccaaaatcagatccactagcactactactccttatcgcactgtccactagctcagcaaaactatggacaggggatgctccaacatctgacccactagcactactactccttatcgaattgtccactagctcagcaaaacttattacatcggccatgtcaagtgaaactgtgattgtggtttggcggaggcgtggaaatctactgctctattatgacacatataaacgcgtattttttgagatgagaaggtgcgaggcaaggcaaaagaattggatcagatgagaaacacttgtgtggacacaaccccaaatatcagaaaagccggcttggttgaaccgactttctttttatattgtcgtgttagctgcactaaaataatctcttaatccagaatcttcctagctgttatttactacgttagtttttcttatttttttttttcaaagcaggcatttgaatcctgcaccacccattttgatgatgctttcggggttcagtgaggagggtgcagccgtgcagggacttcgaaaggtacaaaggaaggagggtgaaggagggctttgcaaagctgttgtcacacttttcgaggtttgggaggtgttaggttgggtgtaggagccaatgaggtgttagggttggggaagggaggtggtctcgttaaggctaatttggtctttatcgaattgcttggaaggtgcatttagaattcaaataagggagtgtaggattcatatgtccataacacaatggacataggtcgggcaacaagatccttcaacataaataacaagcaaaggacactgaagcaattaataagttgttagtgtaaacatttggatttgatttcttaagtaaagtgttagtttaaattttgtggataaaaaaaatatagttagaaaaaaaaattctactaaagtgatcaattagatttttttgacaaaaattaatcaattaatttaataataattcccacctatgttaatatatgaaagaaaatgtctctaaagtgagccaaatatttatatatagagagagacacacacaaacggtaatttccttgtatagctagtgactaatgactcaccgagacattactattatccatggttaacaccacagcggattttgagctatcaaatataatttgtagaaaattaattatctgaattctctgaagctaaatcattaatttgtaataggtgcagacagtaactaggttgtacaatgataattgataaatgtccatttaagcaaatattcttttgttttctttgattcttttctttctagttttttttcttccttcaaattccttttgttctacctgctgctaaagaatgttcgacgggtaaaaaaagtacacgcccattattacatcatttacatggactaatataattgactgctttccatcatcctgtgttaagtaattgcacattttataaagtacaatattactgtttctgacaatatataccagcctccctccaacaattatttttgagtggtacgcgccatcaccatttgacattaaaattggctcctataacataataactgatatttgtaaaaatatgtaacccaaaaataagcatgttaatcagaagcaaatgcttcttaggctgtatcatacatatgccagaatgcacccaccccaaatcagtccccaagtccatttagagtatgtttgtttctccattgtcatgctttcttatagacctcaacgtgactgaaccaaaagcatggattgacgtttttaaggtttttaaaaggagaaacaaacacactcatagaagtctaatacttgtagttcttgacatacaaactctcagaagtcaacccacttccgcttccaccaacatactttcccagagtagcatcagaattggccttgcatcttgccagaaatgcctcttgagctttggcaacattctccttctttccaccccatgtcttgagtgtgctttgttgcagtgctcgcccgaatgagaatgagagagtccatggcttcaacacctccaacttgttcattgcattcaggttgagggtggcttcttcttcactttgcccaccagacagaaacacaacccctggcactgcagctgggacagtcctgcggagggcttgaactgtgtactcagcaatcacctcaggtgatacctgcatgcacacaaattaaattatttttctagttaataatatgtaatttttttttcttcctaaaagtggtagaactggaagaccagtagtttcacctaattgcaactacttaactagcctctaagctccaagagagcttcctgaagaaggttgcacaccaagcaagaaagtggcatcaaggaaatttgaatccatacctatgtggaaggtgagagttcgaactgaccagattcttaactactggtgccaactcacattcgcttccaagtaaatcgaacaatgatatttagacacccttaaattactaatgctccaccaacaccaatcatttctcttttcctatcacatcatatcattcatcatacctctactattcctttatctgtgtcaaatagcatataaggtgtccacaaatcttttttgaagtcaacaatattgcaccatacttcattccaattttatttctaagactagtaagtattcaactatagaatgtaaccatacatatggatgtatgattttgaaaatgttaagttacctttgggctatcagagccgggagtaaccatgttgggcttgagaagagttccttcaagaaggacatgctgctcattcagtgccttgtaaacagctgcaagtacagtttcagtaacagcagcacatttggcgatgtcatgagccccatcagtcaaaatctcaggctcaacaatgggtacaaggccattctcctggcaaatgatggcatagcgtgccaagccctgtgcattttgctggatggaaagctcagagggctcagttgggccaattttgaggactgcacgccacttggcgaagcgtgcaccagccttgtagtactgttggcaccgagctccgagagagtcgaagccctgagtggtggtttcaccatttgtgccagccaactcaacaacacccttgtccactttgatacctgggatgacattgttctcttgaagtacctcaacaaaaggcttcccatcagagcttttctggtaaagagtttcctcaaagaggatgacaccagaaaggtattggagggcatctggagcggtgaagagaagctcgcgaagagcttggcggttcgcctcaatgttctcaacgttaatgctcgataggcgcttcccaatggtgccagtgctctcatctgctgccaagatgcccttcccaggtgtggctatgtacttggcattcttgataagctcatctggaattgatgtaagttataacatacatcccatttggaaaccaaagtctaagagttgtaaacatataaagatttagaatgagcttcttagacatgaatgaatcttttataatttgatattatgttccaataactaatgagaatatgatgcatttctcggctactcttttcttgttaatcagtacattaaagtggaatgtttgacaagcttgtacttcattcaatgaagaattgttcttgtttacgtgtgggtgagagatgtgagtaatattaagagaagaggaggagatatgagatactacctgcgtactttccaacaaaggcagacatggttaaagcttattggatatatggcgggaaacagataacagacgacagcacgaaaaaggagtttagccagaccaaagctatatagataaaaatctcaaaggaatataccaagtggtattctacccaacccatgcaaaggaaccacgtgtccagtgattagcctaacgaaggttatcactcttggataaagcaacgagtgatccttcccttgcccaagtggcacctcatccgtttcaataatatatattccactcaactcatgatatataacaaggaaattttgtggaaagctctcacccgtcatcctcttggacttggctttacatattaagatatcaacctaaaggctcttatgaaaattgtttgcagaacaatgtctcagtcacattatttatttttatttttttgtctttttttcagaatcaagttccatcctcaagttacatctttatgcaatttaccctcgctatatattctcaattttgagagtgatagatatttaattaaagaacttacatactcatttatatctatgaagtaaaaatctccggacagtaaaaatgtatcttgataagccagtgtccggcaaagaataagttcaaagaaaaattctggtataataataaaaggtaaatcaaaatttgcattggaatattccgattatgcgtatgtttgtaaaatcaaacaaaagattatgatcaaaattgattttgaacaataactcggagaccagcagaatcttaattcagcaaattttattgcccccttccgcagtaaaagtctcattaatgatgacgaaccaaaaaatattgtgaatttcctcccaagtataactactgtgaagggggtaccaccttctggtcatcattatctgttccaaagtaccggtccccaaactcacccatgccaggtatgacacggaaatcttcattcaaaccaatctcaatctcagatgtcaggatttttattctcggaaatcttttacagaccacatgaacaccttgaggtgcctggcaatatgagagcatatatatatatatatatgcaaatcattaggtacaagaaaagaaagaagcaacagaaaataacaaagaaatggcaagatatatatgatatacagaggaacaacaacaggcacaagtaacttactgatacgagattgagaaatataatgttggactctggtacacccttctttaaaagcaaagaaattgcttgaacagctgaattacctaaagacgaagatattctaaagttaatcaaaatgaaaacaaacaaattaaatatcaatttttttatatacccttattatgctaactgctatgtaacttaagtcgcagttggctactgacggtttgtatattattttaaaccagtaacataaaaaacaccataaaaataaacattatgagaatgacaaacctgtgcctaagatgggatccagcagtaatacatgcctatctgagatgtcattaggcaacttctcatatattagctgctcaataatcaaaggacaagttagtgaatcaccaaaaaaaaaaaaggataagttagtgatcatgaaatgaatcaaaacagtatacccaagcacacgcaaatgacaaacctgttgaccgttgtcaccttctctatgaataagaattttcccaatcttgatacctttgcagcatgctcgtaaagcattttccatactctccccactgaaattagattgcatatcaaatttaaggacaaattctatttataaaaaattgcagtgatcataggttcacatcaaactgagtaattaggaaagaagaactagtttcttagaatatagagaggggggttggataatattttcaaggataacaagtagagtaccatatgcaatctaaacaatttggtaattataaacccaaatcaacaatagatctttctctttattgaattgttcaagaaagtattttagtcaaaactttgtagcaaggataacaatatttaaacaaatgcccaagtgacttctgatctggactaaaacgatacctccggatgatggagacaccacacaacctcttacagaaatccaccccgctgtataccgatcctgcattgaaggacaagtattagcttagctgtaaccataaaaaggttaagacgtgaaacaaactaattctattttgtaaatatttgaaggagaatatcagcaaagatgcagacaggaaagttaatcattttcagtatggcaatcgcagaaattaacatcatgaacagaacatgtctctctactgtaaaataacatgatatccctttggttcccattatatgaagcatttcttagattgggaattcagacagcagaagttattcgtagtccttccaacttggctgaattatgtctaactatgtcttggataacttggaagtttcaagtggtctaagacatagacaattctaaaacaaggctggaaacatgtagttcatgttactcctcatttttgtgacaataatatggcaggattttagaaaccagagatacccaacaggcacatcatccacaacactttctagtgcaatgagaagagaatattgcatccttagttgcacataaaatacaagtaaaggcgaccatcattgaaaaagaacagcttaccagttggagtcgttacttgcttttctgtaaatggaagatgccctaggccatgttctacaacctggtcaagtgggcgaaatttgaccattaatgcttgaagaaaatgccatgccatcactaatattaagagcaacaaatgaaccccatttacataccaaacgaatcagacggtcagaataaaatacaaagtcatgtttcgttgtttgagaatcacgtatcagagtatgcataccccgtatctgcatcgaagcaattattgtgattattcaacttttaatataaaaaaattgaatttggatgttccagatgaacggggaaagatgggatgattgataaagacgataaataacaagaaaggggtacctgaaaagtagactgaatgacgtataaattaggatatattttacacaagtcatgctgaccaagcttcgtgcgaatatgttgtacaatcaagtcaatagccacatgattatctcctccatggggtataatgatatcagcatacttcttggtgggaagaataaagtcatcaaaagccggcttcacaaatttagaatactgcatcaagtatatattataagaaacagttactaatatatggtaaacataaaaaaaggaaatatgttagcttgatttataatcataaccttaaaacagatcattaaagatttaatttcataaaaactgacttcttacatgttttctaatcaatgaaatttcataacagcctctcagcaacatgaactaaaataacatttccaagtcttgaaatgcagtacaagtaagaaacgtgaaagcaaaaaaaccagaagataatcaaaatatgataatggaagtgcaaatggtgtggctgacggtagctacctgatcaagcacagctccaatttcacgagcattgtcagcagtatcacgcttaattcttctagccagacgaacatcggcatctgcactgaacatttcacaatgtaaagtgatagcataacttagtagtgcaacaacgagatataaaatatgcatgcttgtaaatagttagaaggaagacgtaggcaattattaataaaatagaaaccaacaaataaatgtggggaaaaaaagatgaagatagtgtcattagcataacttgaatatgcgttctcctatatcataatgtggattaggaggggggaaatttaagtccatggggctaaaaggaaaatgaatctgacaacagatccatatatagtaagaaatgccgcagaaaaatacaatacagtaagttataaaagttatattggaacttaaataataagggacctgtgtcaacaaatatcttcatattcatcaatgcccgcactcgtggatcatggaaaacaaggataccttccaaaataataacatccgctgggtttacctgcaaaacacattaaaccaacattttttttttttgatcggcaaacattaaaccaacataaaagggaagtatggctgaaattgtattccatataatttcccctctaatggagataaaacgcaagaagaaacatgtactgcatgatttggcaatcattagtacatcaaagtattcatattcaactacgaaaatcattgtcatctcaagcctatgcaataaaaaactattctttagcatgataataaaaactcaaaatagaaaattataatcttggcctgttctgttatgcatttcaagaacgaggagtaaagttactactaaaaagttgaatgttccatatacccgtcttgctggaaaaacatcattcttgtaacccttaaagtcatactttggaatatctactgcttggctgtgcttcaacttgtccatgacacgtagcaattgctcagtatcaaaagcttctgatgacatcaacaacatacattaggaataaagtagctatagcagtctaagaaccattattcacatatataaaaaaatttaaacgttaaaatttccatatcaaaagttgctaccttatcagtttttaggtgtattatactaattatgcttgctaggtactcaagtatcgtaccatacaaaatgaacttttgttcaacctttggaatggctcataatgcatataacacaatttgtaacactctgacatgtaaaatttgcagtggtctcaccaaccatactcatctctaggctaaatgcgagaatattctagctctggaatttcattaacactttcatgtccctaatcagttaattttgaggtaaattctgctttacatctttcaaaggttaatttttccctgacaccacccttgatattcctgaagcattctgagagtaagaaagatggagttgatactaattgaatgtattgaacttgttttgcaagaaatttaagtatctacgtaaaaacataagacctgataaaaacaaaacaatactaaaacgtgaatattattttaggctttctaacccgatcctcgaaaagcattttaggaaaaacagaactccagatataggagaataagtagatttaaaataaaggaaataaaacaagcatccgaataaatttagtgcatgtttcatcctgtataatttcttctctctctctttattttttatttataaaaggacccaagacaaggcctaaacaataaaaacaagactatctaaagaaggattttgatgtagctccggacttttttatccaatcctctcctgagtgatgatgctatataatgtcttaatgtaaagagaaagttactgattaataatgagagactaatgggtacaattgaactgaccaggatggtcaaagttgtaatcttgtactcttgtaagttcctcctcagtcaaattatggtaaaaagaatcctgttgtacaataaataattcatttattacgctcaacgtatcatcatgtacaataagaaacatcaacccaaattctggaacacataccctcaaaaaagataaaagaaggccaaagtacaaagggaacaagtaaaatatgtaataaataaataaaaggttaagggcatctccttcaagcaagtcacacgagttgctattactttataatttttcacttcctcgctgacataatgttttatggctttaataattcaataaaaaatttctccaatctatcaactctaaaaagtaggctccacaattgatcttgctcttttatattttattattcatcttaattttaatttaaaatatttttatgtcatttgttttagtaagaaataaatatataataatttttaattccataaaatgttcacttccaaataactttgcattaatttttaattaattaatttttagaatacatggaaaatactatgtactaataatttaaataaatcaaatcaattataaattaataatatttttaatgtgaaaaaatataaagtaatatattatgaaaacatagtttaatttataaacaatacaaaaatctaagttatttgttaattaaataatttttaaaaaatctaatattttaatatataaaattaattaaagtccattaaaaagtagaaaactctagttgctttatatagtaacggtgctttatttgtaacccatgaaaattgctctccaacatccgaagaataagactcaagttactagacacttctaatgccaaaagagcaattccattgaagatggcttaacagcataaatgttagaaaatacatccaaagaattttttacttttgtcaactaaaaaatggtgtattcaaatgtgttctgttgttgagaaaatcattgacatttggatggaaattttgagggagaaacacatacatgttcatgataaaagaggtgattagaacaacataatacagaatctgacttgaaaaagaaagaggtggagaaattttggtgaatggtagccaatagaatgtcaatgttgcaatgaaaatacaaaacaaagatgataaaatcattccaatagataaggccgaacaaaataccaaggggattcagataatggaggatacaggatgcttataaggcttgaagcattaaccgcaaactattagttgtattcccttaatatctgactcacagactcatatagttataaattctcaatttgatcaccattcaccagtacgtttagaaaaaatcaatggttattacaagcatacagatgctctctctttcatattattttcactttatttttttctcttttctacctcatcatttattacatttactttctcttttatctttcttttttcttctaatctcttcctacgatttcaatctacaccaaaatgagataaatgattggtactttgcaagaattagatacctgattaacaagtacaactcgttggtcatgaagctgctgaacaatcatatcacaaactgatgtcttaccggatgctgctccaccagcaacacctgtgacatacccaaaccaaaaagtaaatagaaaatgaattagaaccgtagataccaaataaaagttggttagatgtgaaattaagacatacaaagttgttacgatcttattttcaaaactcgtgcgtctaaactttgaaacaaagaaaacttcaatgttaagtatgtaagtttgcgggaagctctacttttatattattaggggttagctgtgtgagttaaccacaatttccaactgtaggatgaccaagtaagaggaatgatcagctgaaatgaaattgtgatgcaagaacgtggactagatcctatgtggttcaacttctccgtaagtacttatgaaagaaaaaatgaaataaaattttctcataagataaaattaatttatgcccaagttaaaattagtttttagagaagataaaataaattgtgaagtatgatagtcttcaaaggtaactttgttcttcttcacttaaaaactaatggctcaatggaatcatatgcaaatgcggggaggaaaaagaaagctgctgagatttctctgccataacagaacagcaaaatccacatatgggctctagaacctcagtttatatcatcccaaaaacttaatatatttagtaccctattatacattagatgatacccaacaaacacaagacaaagtaaatgtaccaagtaccaacattgatttatagacaaatcaggaatttatgactacataggcagcttggaatgcaaaaacacacacctatcacgaaaggttgtttatacatgtcagttgctgaagtggttggttgctctgtgccagcctttctttgctctaagccatccatgtgaaatccagaaaaatgaacctcggataaagactccattaagtcaacaactgatttagtacccataggcaatgacctggataaataatacctgaaaatcacagatagagaaatcaataacatacaaatactactcaataaaagaatatgaataacaatagttttaacagcttgcaaatttggctgattggatcaagccaaccatttcactctttggtaatgttactaattttcactaaaagactagccagtagaacaatgctcaagacggattcaccctttaggaggcatcatttgtcatcaagttcacttcaggaattataaggttagctttgtggttaaagggagaattcacagaagttgttaattcgaagtcctttccaaactctcactaatatactaataaaactaacaactaacatttattgattaaaaaaaaaaaaaaaaaaaatcacttcctaaagccatctagatatataccaagggcttttttagtcaataaaaccaaagtgttaatctaaattcctcaagtaatggacaaaacaattaatttccaatctcattctctccacgccatgatctatcaaatcaaattaatcaggacatcatcgacatatacatgacacgcttccatccgatccgatgaacaaaagacatgatatcatcaccatgcggtgcacgtaacaatccatccaaccagagtcagtgagaggttatatttgcgtgcgaagtgcaaagtgcaaagaaacagataaattaaaactggttcagttccaacgtgagcgaattagcgcagccattgcactaaagacagggatagcagtgatgaatgaatgaatgcagtttaaagttaagaaatccagatccagttaaatgaggagaggagacgagaagatcaaataaccaaatgctgaacgatggcaaaacgtacctgatgaactcagaattgtacgaaatagagaaagaggaacggagcgaaagaaagaaagaaaaagggaaaatgtatagtgacagacagatatgatgctatttggtgcactatcagacgctgcctatttacccttttctcttagtttatatatatagtgacgtccaatgaggcaatgagctataaacagaccttgatcttcaggggatcttcaaattaccaccttcttccatcctgaattgaaactactacactgcttcacccaaaagcatgcgctacgttggacaaatcatttaagctattttttttttactaactaaatacttattttttaaataatttctaaatttttttaagtaatttttaatattttttaaaatactatttgaaataatatttttttaaatgctaacttctagcatattttatatatatatatatatatattatctttaacatatttattcaatttttttattatcctttttagaaatgttattttacatttttaaattacttcaataattaatttgattaaacacttataatttaataagttagtttataagtcttcaatttttaactataactaattttccaattttctaactttcaactaacttttcagctaattttgtcaaatataatcaatataaacaagtgctaatgtccaaagtttatttaaaactattgatcgatttcattaatgtgttcataatgcaaatgaaaaaaaatattaaatgtcttattaaatataaggattaattgcattttttatcctgcagggtaattgtgtaattttggtttataggttttagttgcacaaattgagtcacaagtattctccaaagaatataattaaattcgtgaaacaaacactccctaataaattttggtacggtagcacataagttgacgatgataatgtgaagtgacaattaacatattgtcttacacttatattaacatagcttagttatacttctagtctatcaagccttataattgtgagagattaaaaatgcataagtcatattaacatatgtgttagacaatatatcaattatcacgtcaatgttatgcaacacattctattaaaaatatgttatcttttttattaatatgtgaggcctttttaatttataaaactaataaaaaaattgccagtaggtcaaaagcttgagttctagttattttactttggtttaggtacaatacctagaaaatcaaaagtgcaattaagtttttaaacaaatgatcaacaagcaatgggttaagttaagtggtgatggatttatattccttgagcaagtaactaagggagtaagggctcaaattttaatttttgtgcataaagaaaatcaagtcaaaaatggcaacttacctttaaaacctttagctcttcaaagaatattaatcttcttataatctataatttcagttttttaataaaataatttgtttctaaaataagtttgtttgtttgggatcctagcttaaatttagaagaagaaaaaattgaagaaaaaaaaaaagatgtttttacagcttattttctgtttcggctatttttatactattttattacgtaaaagctaatcttttgttgcattcaaaaatatcaattatttttaaatcacttttcaacaaacttactcaaataaaaattgatcatgattatgattgattatacaaataattaactaaacatataattgattattcaaatagtctaatttttaccattatttcaaacacatctaaaatactccttataataccaacaaatcgttgatgcaaatatttttgtattcggtcaccataaataaggtgtcagatttgaactttgtgaataaaaaaatatttttaagagaaaaaatcctattaaagtgatcaatcagatttttcgataaaaattagtcattatcaaaattgatagatatttcacaccaatatcataattaaaaaaaatactcctcacaaccataagtgtatttttttaaaaatgaaataaataaatcatggaataccatatttttatataataatttttaaaatatattttttttaatttcttagaacaatgtgtaggaacacgtattggaaattggtagagattagagaaacggaaaatcagatagtatacgtagcgtatgggtatggaagtggtagagggacagggacaggggagtgtggagtgggtacgtgtggtgtggttaatgacttaatgtgtctatgtttcagtgtggaaatgtcactcactagactgtcatctgtttgggggccccacgcccgcagtatctaatattttgagcatccaccttgacactgaatctcatgtcgggcctaatgccttttcctccttttctacacctttcattatttttaaacaataattattttaaattcatttctgataatatgaatttaattagattagatttattcatatttaataatttacacatttttttaatatgtcatttaatatatgacctccttttttatattattataatttaatttattcttactttaaactaactaaatacattaatattttattcttattaaatatttcttaatctaggttaatatacgagacatcgaccaacgtgtcacattttttaaaaaaattcatccaaatgtcacgcgaacagtagtatttcccatactgtcacgctacctatttgatccaaggcccaacgaaataagtagctgatgtggtgcaattttgtttgtcatgtacttcgctataaaggctagcgaaatacgcggtcaacaacgggtaggacacgtggcagacactacgtatttcgctagagccaaacaaaatatgtggcattggaacacgtgtcacgcatgcatgaattggtggtgatattgattatataaacttcaaacggtcataacttttgatagaaacgtctgattgaggcgtacgatatgttaaaacgctcgaaatttataagagaaggtctagacaaattccctaaagggatttggtcaactatttttttcctccaaaaaacgcctctcagtatgtgaaaattaggatttaggattcaatcatccaaaaaattccttttttctacttttttaattatttaattagttaatttaatgctatttttatttttttaattacttcttttaatttcgagcattttgacatatcgtacatctcgatcggacatttctatcaaaagttagaccatttgaaatttatataattaatatcaccaccaattcatgcatgcgtgacacatgttccaacgtttttttttttttttcgttgtcacgtatttctcttggcccccagcgaaatacgcggccaacaaaattgtgccacatcagctacttatttcgctgggccttatagtgaaataggtggcgtgacagtatgaaaaatactattattcgcgtgacatttgggtaaatttttttaaaattgtgacacgctaatcgatgtctcgtatattaatcgtaaatatcaataattttacagaaaaaaaatatactttttatggacttaaatataagaaaggacctctcaaaaaaaatatttaagaaaggaatgtccaatttaatgaactgaattatagcaaaataatatttttcatcgacttaatatcaactaatttaatcttatttaagttattattataagaatattcttaattcaattaaaatgtaaaagttatcttccattaatatgattaaaagtagttaaaaaatgtagttctttttttaaatgaaattaactaacaactttaaatagtataaaattattaattttgtttccatttgaatttagaggaagtgagtgttaaagatgattaatttttttctaattgtgtttgaaaaataatttcttatgcaaaataaaacttacttcagtgatatctaaattttaaaagaaatgaattactttttaactatcagaatatccattgtgcaaacatatatatatatatatatatatatatatatatagtaaatagtgtataaagtatgctctcacgacaacacaaagggactaattaatattgagactaaatgattatagtaaatagtgtattaatgtatgctctcacaatataaagggactaattgagaccaaatggttcaaaggagagaaaggattttaatgaagagagaaagaggagagggattttaattagacattttgtttgggtgagacaatgggagaagaaaggttttaataaaggaaggagatcaatgtagcctttttttttatttggttcataagagagtatgaaattttaaagattaatttactttcgtacagttatgattttaagtttaaaacgttgggatagtttacgtcttaggacactttaaattatttaaattctctcttcatcccttcaaatccttcgttagaagggtgcaaaaattagatacttcatttttttccattctcttatattgttcccaaccagtgaaggagattttacattattgttaattatgaactgcacattaaatttgttaacttttatattaataatcttaaaaatcatatttatgatgatttttaattcattggtaatgtaaaaaatttaagactaactatacatcaaaattaatttttttataataagcattttaagtgtcatttttaattagttaatagaatgaaaaattaaattaatcaaaattaaacttattaattgtataaaaaaaattaataaacatccgtagccagtataattattttatatcatcaaataataaaaaatatttttttatgactcttaaggtaattattaaaaatcaataaattacatatagtaatttgttattgaatataatgtaaaagattgtactattatttgtgaatatattatttattcataaaaaattaaatatgtgtatttaatattctaattgaattttgtatacaatattaagaaaataaaagaattgttaatttgtaatttgtttgttataaaataaatatgacattattcttgatgtacgtcatgtcgtttccgtcttacttctcattttacccgtctccacttgggtcccactaattgtcatccacgtctcgggcctgattcacagtgattcaatcatgccttgaaaatcgaaattgttgaaatcgagagtattctcttgtgtttaacactttaactatactattaaatcaaatgatcaattattgtattagtcaaataattataaggcatgattattttaatggagtactactattatctctggtcttatggacagtgtaagcaacagattgatattatctttcgtcctaattataaaaaaattattattttaaatcctctaaaaataattaattttaaatttatttagagttaactttcatctatatccttaatttattattaatttcgtttactagatattcattcattaaattatgaatactgatattaaatgtgattattacttacaacattcaaatttaaaagaatttttataataaaatttgaatctatgataacattaaatgtgagtttttatttattttattttaatgattcatcatatgtttcttatatatagaattagagataatatcattttatgattttaattaatttcattcaattatttatgtaatattttcttttaatttatgaattttcttttccttttaaaataagtacatgtattttataagtttccctttattaagattttttgtatttaaaaaatattaatattttattttattcatactttatatttattaagtttgataataaaaatatcaataaagtaaaattatggaaaagataagttgtaatattttcatatttatgtaaaaaaaaggtgattccacaataattagtaatatggctaaattaaaatatataagtaaaaaataacttacatttaagagtcaattttgtacaattgagttagactgaaacttcaattgtaagatgatatgtaagtttatcccaatgattatcgttggacttattgagtcattcactagtgagtcattattagaccaattacaaatgttaaatcatgcaaatattacatttgagatgtttagtcttctacatgagaaaagatgcttgagatctcatcaactaataatattgacaaataaaagtatataagtggaagagtaaccttcacctcataagttgattttgtagaattgagttagatcaaatcttgaattataaaaaaatattaataaatgttaaaattggttatgatgcctcttgcgcctccatgcatgagcaacctggctcaacaatgtagtcaagctttgtatcattagccatggcagcttgtcactcttattgtgttgccatagccttatgtctacaaattgaagctctcagtggtactcgttcaacttgggatggatttggcatgtcctccctagagcccacttgacctatgtgtccaatataagatgtacacaacataacaaacctgcaaatcaatataaatttaataaacatataaaaacatacattgatttccaagtacacaagtaaaacttatttatgttgtgtatttgattaggtacatgacataaacttatttttgttgtgcgcctcatttaggtatataacgaaaacaagttccatcaaatctttaagacggaaaaaaggagcttgaaatgctctcttgtgaagtcacaatcaatggagtttaaaacactttgattcaacaaagttagagtgtgatggagagaaagttcaatgggggaagagagggattggaaaagggggcgtgacaccaaaaacaataaaggggtcaagaaggtagaagaaaaactaagaagtgagggaaagggggtgaagggtgttctaactaaggtgtgtcttgaggggtacgaaggaataagggtatatgcatctttttaatgtattgtggtaaatagtaattgagagggtgccaatagttatgtccttaggagaataagcccacaggtcataattgaattaaatagtttcttgtgcttaggtgctaatttgaacattttctctaacaaatattgcaccaggaatatgttattggacctgaaatgtttataagcagggattaactttctacaccattcatttttccaatacacccaacatgcacagtgtaataccaattttacccttctcataacccgtaagttgcataccaacatacaccattcgatttcatacggatcgacaatccgtaagagtcatacggatcgacaatccgtaagagtcatacggattgacaatccatatgactcttacggatcaacaatccgtatgagtcatatggattgccaatccatatgattcatacggatcggcaatccgcaagagtcatatggattgtcaatccgtatggaccttacggattgccaatctgtaaaatcaatatggattgccaatccgtcagcttcctccgtcagtgcttgagttgcagagcttacctccgacggcgaaccggccaacgcaacctccaccaacactagccacgacctccacaaccagctcaacaatgcaagacgcacccaacagccaacaacagcacgcaggagaagaaaaccaccggaaaaagaagaagaatggcgaaaaggtgaggctggtgtatgttaaaaatcaccaagaactttattgtcatttatgaaaaatggtgggtgtatggaaaatttgcctggtatgagaagttaaacccttataagcatcatgtatcaaatgctccaacccaagatggtcattctagaataacaaaaataaataattttatggacccaaaagcaaaacattaaatgtcttcaaggatattcaaaaacaaaataaaaaaaaatatatagtaaaaatatatttttgtctgacagtactttaaacaagaaaactttaaaaaaatatctgccactaaacaaaataaaaacaatacttctttgaaatttttcttgaaaaaagtggtggaatgtggacggaccgacagacctggtgtctcaatggaaaatactttattcgttgtttaaagatttttgtaattagttttcttaatttaatgtattttttaattactttagttaattagcaaaatattttgctctttaataaaaaaatgaattcttattttttttaaaaagaaataaatggcttaagctattgttttatttttatataaataaaaaataaacagaataatatgaattgttttatgtgacttaaaacaatgaactaagattagagggtttgcatccgagatcaccatgaaagagttgttgctactcgaactaattttagaggcccatgtctaacatttgcagaaggagaagcgtgggcactattaaaaagattagagaaattaataaaaaaacggtaaaaaatagataatttaaacatcacaataaaaggacggaactaaataattagagaagttaaacaatgataataaataataaaaacatgaaaataataaattaaatttaaattatacaataatacttgtacaaaaatctaatttatatgtaaatagataaaataaataaaaaagcaagcatctaccctatctaaattggggaatcaacgttcggaaaaatgtttgaattttggaacattttggctctcatgtttctttccacatctaacgcatgtcctggatagaatatagttttatcatatgcctttattcccgtcaacaatgggtcccgtaatctctcttggctatgaatttttatttttaactgtggtaagttacagaaataaactaaatttaactgtggtaagttgacaacaggccacagttgccataatctctcttttcaattatattttttcttcttccatttgtaagattgaaacccaagtgttaattgtgtctatttctttttaaaacaaaaacaaaactcataaaagttaaaagaaagcaaattttggggagcaaaaaagttatgaaaggcacaaacaatattggtacgacgtcattcagggcgaatcgtgccgttcggtgggtcccacagaggaccacagttgccacctaatcagacgccacatcggatacatacgccgttaagacgttgtgatcccccgaggacacgggagtgacggagacaccaacgttcaaaatgcaagttcaagtttaaggttgtttttgttttgttttaagttctctttctttctgtttctctctcaactctcaacacattcaaaccaagcatttaatataagcctcttcgcattttttaacgctcattcatcatcaaatcaaatccacgagaaccctgtttctcctcacgcttctgcctcagatccaatcttcataacccaaagcttcactttcccaggtattttaaatgccaagttctttttaaacccaaaacaatttgaattttatttttcggtggttggattctaatagtatattaagaactgcattgaagcatttctccaattgttggtgttgcaggaaacatgccacaggaaaccttaccaaactctaatttcatatctcctcttaagagaggattgaatttgaaaggttcggcggcttcagcatgtaacaacaatgagactttacacagtttgacggaggataccatcaacgatcatgaattggctcagagaaaagcagaggaagcaggtatcaactttgattacgattatgtcattgcacattagcactgttctcttgttacactcgctatgtgttcgtaattgtcacctaatgcttcatcacaaataaactatgagttgggaacttagattttatcaggtagtactttttaatatttgtattctgaaaacaatatctttgagagcataggaatttaaggttgtcccccaagattgaaccaaaacaggggagtaagaacttagttttagagctcactgaaactagaaagcactgatactatctgtgtttaatttgaagtagttaataatatttcttctaaaaaaaaaaatccaaagacccatttaggaataatgaacaagtgatacttatactaatactccgcaaaaaaagacttaatcttctgttaagattaaataatgaaacatgcttattgcttgaattcaggcacatttcttggaaaagtttcattatttgaacataaatatctttactactctttttttttttttaataatatttttcatatatactcattttaaaaatataccctataattaaaaaaacacccttaaataaaagagaacaacgttttattgtttcacaataatgtttctctttttttttttggcattataataatgtttctttatagtcatagaaaaagtttcttttgttttttccccatttcctctggttttcttagcgaaattgatttgtttcttacattttcttttctattctatctactaaattattacttgcacttgcacattattgctttgtttaagaaaagggaaaagggaaaaaagtattgtataaaaaaacaaagacaaataatgaataattattgtaactagattaaacgaagtgaggctggaaaagagaaaaagaaagggacagaggacaaatgaaaagatcgtggagcacaaaattatatgcaatgcctggggatgtgttgtgttgctctaaaatgggatcactcccccagcacaccagcattcaatggtggcgtgggtctttgacgttgttattcaaattttgtgatttaagcctggtcgtttaaatacatgtcaactattaatttaagaactagtactgcttgaaattcagatttaaaaacccaccaaaatcttgttctattggtgggataacatttttctttcactgccgaatgtaactgactttagtttaggtttatctatttttaatttttcggtaattatttatgtaaaactttaaatcaagaatgtttaatattttcttttaaatttataaccctattttaaaagtaattttatatggtattcaaataaagtcaagttaatacagtagtatttattacactactttacaattaattattcttttcaaaaagtaatatggcctaatttcaaacaggaaacaccatgattttggtacccatttaatgcaacactgctgtaaataacaatcgtgactagactactttaactttaacctttgattaattaaaattcaaactttggcctttgtttaatcagaattcacaaatataaaagcataacagtaaacgacatttcttgagagaatattgtttttttgggtaacatttcttgagtatgaaatgagagtagacatgttaaatttatttatttactcttatgaatcaccattatacctcctcaaagaaatttaacgcaagtttgacatgattttttttataaaaggaatagcgttacttttcaattttaaaattcttttaatgaaattttgattgaaagactatcactagggttgttctaatattgttgtaaaaaaaaagttgttctaaaatgtgaaaattgggaagtgtgtacaagattttaagttataattttgttttttttattataaaataattcacaacatttatctagcacatctgaataaaccatcaattctcttcttaaaaaaaatcttgtgttattgtaaaaaaaataaaaaagtgtgcatgaaacggcggcgtatagacaattggacattacccgccatgtctttgttgttagttgttcaaatgttgtttgtttgtgcttgtgagatcagcttcaaggaggtacgtagcagcagaatggcttcggcaaatggacaatggcgcatcttcatcactctccaaagaaccctccgaagaggaattctgcctcgcactccgcaacggtctcattctctgcaacgtcctcaacagagtcaaccccggcgctgtcgtcaaggttgtcgacaatgcggtggtcgacgacgtcgccgttcagtcttctgagggacccgcccagtccgcaattcagtatttcgagaacatgcgaaactttctcgaagccgtcaacgacatgaagcttttgaccttcgaagcttccgatttggaaaaggtgaccatgaccctcctcccctttcacgtcaagatactaactttgctctattttgttaatggggttgagttatgaagcaccgatacttttatttcgtatcggtttggatacttcacctatggctatgtgtatatgtccaatgcatgaatttcaagaaacattgtctctttcatgaaccaaagatggaaattattcttatttgtagacaataggataggaagtgatttatgattacaatgatttattgttggaaaaaccacctaaattgtggtcacccctagactgaggggtgtgttgaaagtcccacatggcggatagctgtgggcaaaagggagacatgttgaagtctcccattgtctaaagttagtgccgagatacacggtataaatggggagtaatcctcaccttaaaacttggttttgtagaattgggttagactcataactctctttctgacatttataattttattttgtttttagtaatatataagaagtatgttcttaatttggatttgtagaattgcaattatatatttattatgttttatgattttttatacatatctatatgtgtatcttatacgtattgtatcctatatatttctagaataattgtgtcgtattggatacatgtatcatatatgggcatcataggggttgagttttttttgtaggggggttcgtcaagcaaagttgtggactgcattctctgtttgaaagggtattatgaatggaagctatcgggtggggttggggtgtggaggtatggtggaactgtcaggattacttccttccctaaatggtcttcttccaacatactgggcactgaaagagttgttgatgagaccgagtcatcgcagtttcttcatctgtctggagaggtttcagttgaagaaaccaaagctgctaatgctttggcttctgtttttgatcagtttggactcaaacttctcctggcttacctcagagaggctgatggggttgatgatctgcctttgaatgcaatggtaggtaagatcctttcctatgtggtgtgattttgtaatttttaggactggcaaattagattgttgtttgaaaattgttttgagaaattaaatatatgcatgaagattcatttgattcatgtgatcagcaatcttatttgtgattgggtgaaattgtgtaggtaattgatactttgctcaggaaggttgtcaatgatttttctgcattgcttgattctcaaggcactcaggtacttcagaaattaatgcatcttttttgtcttgctatcacgtttgtaatgtaaaatcactttcagtgtttgtaaggttacctaaaatttaacaattgtccgcagcttggacatttcctcaagaaaatattgaaaggcaatactggttgcctctccaagagagaattcatagaagctatcacattatatctaaatcaaagaggtagtttggcatcaaatgaattctctaaactatgcacttgcggtggaaaacgcgatagtaatcagcacaatgtcagttattctgccaagcatgctgaaataagtgatgcccagcaaaaagagctccaggtataaaattgggaaatacaatgtactgctttagatgatttatcatgcggtattagattagcatcattcactgtaatggtgtttttttccctggtctatagaaactgaagtacttatatgacgagataaaattggaggtcaaacaaattcaatccaagtgggaccaagaattgagaaggcttggtaatgatccaatgacttttttttccatgaaaaatattcttcatgtatgtaaaatcttttataatgcaatattctttcataatgctaagtcgagttctatgtactacttagagaatcatataaagagccttgaagaggcctcctcttcctaccacaaagttttggaggagaatcgctctctttacaatcaagtacaagatctcaaaggtacacaagaatccgagatgctttttcaaggatctacttacatgatttatgtattttaatagatttgcttccttacaggagccattagggtctactgcagagtgaggccattcttaccaggacaatcaaatggacaatctactgtagattatataggagacaatggaaacataatgattatgaatccccataagcaaggaaaagatgctagaagggtattttcattcaataaggtgtttgcaacaagtgccacccaaggtattttaattttttgacatattattgcaaaatgtatagggccagcaaatactttgttctatgtgattattcctaaatgactctctgtaaaatgtagtaaagatttgaaaataataatggacattttttgacatgttgttttagataatagagatttggttatgtaatgaagaatgaacaaaaacgagtatttgtatactggattgttaaatgataataatcatgatatcttatgtaatgtatttgttacaaataaaataatcttttttgaaatttatatcttctctgtcaaaacttatatgatgatttttctttgtcatgtgcagagcaaatatatgctgacactcaaccattggttaggtccgccttagatggctataatgtatgcatctttgcatatggacagactgggtcaggaaagacctacacaatggtaacattacatacataaaaattctagcacatagaagcaatctatcacaattttatgcatttacttaaattgaagtgttgtcctcattctaaattctctgtttttattgcatgcctcataagaaagatcaaaatttatgtgttttgcactgaaattggtgactttcttttcatgtactagtagaaaaatgtagatttttgtccactgtttgtggtgcatgttatggatacttgaaatcaagaatattatgatttgttatggtacgcaattcttttaatagtatcttatcttggtttggagatgtttcttcttaaaaaggagacaattaaaattttaaaaagacctgcatgttattaaatatgttttcatcagcacaaagaaaactgattgtattatttatggacttgatcaaaccttaaccacattgaaagtgtgatatcacaaaatcattttaatattgtcttatcatttttcttatgcatgtgcgttttactgcttggatagagtggccctgatctgatgactgaagagacatggggtgtaaactatagggctttgcgtgacttatttcatatttcaaaggaaagagcagatgccataaaatatgaagttggcgtccagatgattgaaatatacaatgaacaagtgagagatttattagtcagcgatggctctaacagaagatatccttcaagcccatacattctgtatttctattaaattgtaatcatttttcacttctgtatatcaaaactttttgcatactcccccccaaaaaaacaatatcatatatttttttggcttgttcatttccttaacaagacatacattagatatacgaaacaactctcaattgaatggtcttaatgtgcctgatgcatctttagtcccagttaattgtactcaagatgttcttgatttaatgaaaattggtcagaagaatcgtgctgttggtgctacagctctaaatgagcgaagcagccgttctcataggtaaaatttcttcttcataaatattgatggctactttaaccatataatatatttttcttaaataaatttctttaccatccaattgcagtgtgttgacagttcatgtcagagggagggacttagtgtctaactccactcttaagggttgtctccatcttgtggatttggctggaagtgagagagtggacaaatctgaggctgttggcgagagactaaaggaggcccagcatataaataaatctctttctgcacttggggatgttatctctgctttggcacataagagtccacatattccttatagaaatagcaagctcacacaagttctacaagattcattaggtaacaagcagacttaaattgatttttttctctctgtacacattcctcattataattggctagaacaaacttaaaagttgggattgttttctttttcagcttcaaccaccatctttttctactacagatttttgccctctgttgttttaattgttttttagttgggaaggggttgagatgggttgattaatgaattgcaatttaaatattgatattaatgtatttggatcattccatagtaattttatatttttaatttctgtataaaacaacttaacctgtgttttttccctctatatcaataggtggccatgcaaaaactttgatgtttgttcatataaatcctgaagtcaatgctcttggagaaacaattagcacacttaagtttgcagagagggttgcaaccattgaacttggtgctgctcaatctaataaagaaactggagaaattcgggagctaaaggaagaggtttggtttttggtcataactatagcaattttaaagttaactttagccaatattataacagtttgagcattttatagatatcaaatatcaaatcagcattggagaggaaggaaactgaactacaacaatggaaagctgggaatacacgaaataccatagaatctcagaaagcaccaagagctgtttcacctttccgtttgcccaaaaatggtaccagtgacaacatgaaacctgaaaattgtcaaagacccatggatgatagaagctctgaggttattgcatgcttatataaactttaatgataaatttggttaaattatattaggaaattgtatcacaatgaagtgtaatttgtactctctaaatctgaaattatatttacaggctaaaacttgttcttcgggtaagcaaagaaggtcaagatttccctcaacatttatagagaaggactccatgccaaaaatgtctcttctagctgaagaaaaattagtgagctcagggaaaggtagatcaccatcacctccagtcaggaggagatcaatatcgactgatagagggtctgtcattaaaagcaaggtcaaaagtgacacatcagacaaccaaccaatcttaaagcatccatttccaactagagtactagtaaataaatcgcttgtcacaatgccaatggcctcatctacagagaataattcaagggtgaatctgcattcacaggagccagtgaagcaggataacactaatgaaactctcttcaacctccagatggtaaactccaggaaagttcatcaagaacacgaagaggaacaaatcaagcaagctcctggttcagtaagacaaggtggtactaggaacaacaaggctgaaagtaaggccaaggttaagcattttcagcaattgccctttaggattcaaaaggctgatatgatacctggttttgacatggaaattggccgtgaaatgaccatggaggcacttcggaaaaacgattattttgagccagaaaatgatatacgcctcatggagtctgcagtcaatggtgttgtaaatattaaaaagatacatcagaacatctctaggaattctcagaacattggatcaaggtatggcttaaagaatcattaaaaaattatgctatgctcgttgatttgtttcttctcattgaaaatgacattattcaaagcttgattgataaatgagtattattgtcacatgcagaggaataatgcaagcagctgagcctttattgtccagcaaagttgaaaacaaaattttactacatgctacaggtcgcaatcttaaggaaggcaccaatactacattgcctgaatttagaaggagccgatctacgccacgtgggaagttttttgttttctcttgaggatttcaggttaaaatttgataattttttacattatttatttttgtacagtgacaactattgatgtgcatgttggagtgccggctcacataattttgttgactgaggtctcgaggtcagtttgtgcgaccttttcctctgttttcgtgttatgttgctcgtttgtaatttaaatttttggatgtcattatacttctgaaatcttgaggtgttgtgctacattgataagaggtatatttactgcattttatgaattcagcttcccattacaaattcaacaaaagtaatggaagaaggtaaaaataatttattgaaaagcttgttattacaattgtacaaggttgaatatttttttaattataaaatattgtatttttttaatatattttacaaattagtcctgtatttttttttttttttagaaagcttctactgttagcattccatttcatatcaacgttcagactttagcgtatacatgtttcacattcagtcaaattattatactcccgtaactcgcccatggaattattgaattataatctctataggacgctacatgtgtacttaatggttataaaaatgaagaactaacaaccaatagttatgaaaattgacatcgaaatattaggtcagtgagtcagatgtttagttggagggttatttattaatccggtatatatattaatatttttaaaaatatatataatgtatctaatataatgtgattaattcatatttttattctctaaaattaaatttattgtcacgaactaattataaaatattatatagttatttattactataaattattattattttattggatattattattaaattattaagaaaacttttattttttaagactaaatacaaaagttatcaaataatcataaataagtttgttaaatatgtataaaacatataaatattaaattatattatgatcaatatgataataattagttattatatattgttattagataaaaatatatattataggattatattatatgttattcaatgattaactattaacaatttaacatataggaattgagggaaaaaaaaacttgataggatcaaattaggccaacttagtttgggtcaccatatttgaccaaatttgattaggtcaatctgggccaaactaaattgaatatatttccggtcttttattttaattggaatgctcagggcactaatattgattgaactagtcaactaatttagaccgatttttataactatgctaacaacttgacctttttgtataaaattctaaaatgagagactgtataaaaagaattgaaatattttgaggagcctttactctctctctcacacaacctgttcaatgccaaaacacaggaaatggtcaaaggataaccaggaattgaggcaacaagatgacgatttccaatataataattgatgtttattgctttagaaataaatttaagttcaatctcatcagaatattaaattagtttttataacttttggcatataaatatataatatattataaatatagggttttctctcatggatataccaatttttcagttagtatagcaaggtgcataaaaaatttagggcagaaaagccaactttatcttttattctaattctaataaactcattatagggataatatagtaatttgacataatatattaggtgcttctctctcctaaacaaattctctcaccatgttttcggatctgcactgcaccctcctcgacatatcatcctcaatcgcggcttccgttttgctaatttgcacaacacggttttgctaatatcctctgcataaatatggaactatctcagttgttattctaaattttcggtgcaccttactaatgcacaccaactgaaaatgtggtgtgtgcatattagcaaaccccatatattaaatttaagtccaacctcgtcataatattcaatttaatgtatttacaaaataataataacaatggaaggattttctaaaagcatgctatattagtacctgataacatctcgaccagcacattcctttgatgccttttttccaaatatgacgcttactaaaattaattaggttgaaaataatgcagaaaacggctctagtagggttaaagttataagtgcaacttatttccattttcatctttcaatttgagagagacattaatctattaatagataaaagcaataaaaaggatcatatgttctcgtgacatctcattgacaaccacaacctagattttgttcctcaaagcgtgtcttaattttcacataaattctcaacattgagattcattagtcattcaacctttgattaagaacccctttgaagctgttcgtgttttgaatcaacaaggcgtgaaattaagatgatggttcattgttctattgttagaagcatctttgatgggtttaccaattataattctctttgaccattggaggccaaagaggatcaattttcgatcctacaagaagataagaaaatcatatacatttgcaggctcaatccagacttgtccaagttatagaatctgtgatgttagccattccaaaaccacattccaggaagaaaacaacatgcaaggataataaagccacgaaaatagatgcccctcagagttttgtcacctttgtttatcaaaccaaagtagcagaattgttacgaagtataacagtttcatggtgcaaggaccccacgaatcatttcctttccatgagcatcgacaacactttggaagagaacaagtacacctgcaagattgatttggaatccgggcaatcttggggtaaaaagggtcttagatcatttgaaatagcaggtgcaagagtagacattttttgggattttcggcatgcagaattctccgccacaagtccacagccttgctcgggttattacgttgccttggtttacaagaaagaggtgcttctgttgttgggagatttggagaaggatgcttatgaaagaaccaaatcaaaaccatccctagatgaggctaccttgttgtgcaagagagacaatgtgtatgggaagaaaatgttttgtaccagagccattctggaagatggtaagacagaacatgatgttgtgattgagacttccctttctgggcctgatgatccagaaatgtggattaacatagatgggatgttggccagtagaataatgaacttgcattggagattcagagggaatgaaatagtgatggtgaataatttgcctgtgcaaatcttttgggatgttcatgattggcttttcaccaatgaccttggtttaggccctgctttctttgttttcaagccagtctttttggaaactactagcgattctaatagcatagaatgcctagaaagaggtgggggtagcaacggaagtgaattactagaggagaattcatccacccaaggtttttgccattatctttatgcttggagaattgcttgagattcattgtgtgttctccaaaaagtcttgatcttttttggtagtaaagcaaaaaggtgttgcttttcatacattttctttaatagcattgacatcgagttattgaaaacagtgtctcttgcccctttcttatttttccttccttgagctatttgatatatatgaccaggaaaaatagtaactaaacaactagcttaaatttttaaggtatgacctataataagttaaattataaaatggatcttctgaattagggtgtacttggaaatctatttacacctttctaaacttaagttttcccacatctcggtacacaaatgtagaaggaaagggaaggatggattgactgttaaattcaactaaatatattttcaaacacgtacgtagtttagatttataaactcaaaattcactatttttaccaaattataacacaaccaaccacttaacaacatttaaaaatgtcaataccatctaattgtgtcttaagatgattttgtaaaattctttaaaaaaatacaaagaatgaaacatctctctctacacacatacataaatggtttatatatatatatatataatgtgtccatgggcacatgataaagaaccttaaatgccaatgtttataattattttaaaaagttttagcacaataactcctgtcagcttgtttcgaatgtataattatttctttgtatagctacttctttttggatgtcaaaccaaattactacttaataagaattaacattccttgaaaaagaggtgatccagttgtaccaactatattttgttacaattgtactttagataacaacttgtgttttaatacaataaacttttccttttaataaaaaatatatttaatttattttttatcatgtgtccacgtaaaaacactcattaatttttctttttctttaatttaatatggtcctacaaaaagttagaaccaataatatcatgcatactatccaattccttatcactcgttaaaaattgattctaaaatatgagtggagattggttcaagtgtgaagttgtgaatatgtgattatgccagctattgtatcctgcattttcaattacatttcgaaaagtttatttgggaataaaaatttgcaggtgcaggaaacaaatgttatgccttgctgactgtcagagagtgacaggccaagcccagacagcccgttttaactgggtcatggggaaatcagcccgattcaaattagcccagcccacgagggctaatccgggccgacccaaatgtcaggccccataccggaaaacaaaatttggacaaaataaaaaagaggagaggagaaacgaaccaaaaatggggaaccccttcgtttggaaggcacaaattatggttgcatgaacatggcaggtttcgcggcaaacatcggcttcaaaatcccgtcccactttccctgtcgcgttttttcaattcatcggtaacttctctctctcatttttagctctaaaccttctttggttactgaaacaaaatggcagaaaagcttgattcttgtgagagtaaatgagtaatggagttctagtttagctacccaattggaagcattctactgggttgaaggaagttcttcaatttctttctgtctctccacccacttacatataaatataagcttcagctttctatagattctgaaacattttgaccattgttctaattatttattttttaatttggtattaaaaaataggagtatttggaagtttcagattagcttgaagagaagagactatagttcttctgttcctgttaggtgcatttccagcacatcctgcagggtgaaaatacttgaaactgcactgccagtgaaaagcctgggatattgtagctgtcctgatgttaatgtgctcaagataaatggtggaaaagatgtgcatgcaacaattgcacattgtgaaatttctcaagacccgaatgaaatttgccctgacttattatttgatgacagtgaacaaggtaaacttctattttctatttaatatgatatggttttggttcatcatttggtagttagttgtgcttcgctatgcaggatgcaggggaactacgtcactactacctatagctaaatacaatagatttatttgtgattttaagcattctaattcaatttgatgcctgacatgggattgttgactcggatttaagtctggtgattcaatgttcttatattgtggtactggataaactcagcttgccataaaagtaataagagattgttcacacttttgaggatacattgtgatttgtgattgatggtctttgtaattgataaattgaataaaaataagcttcttacaaaaaaaaatgacgcttgttaagaaaataatgggaaagaaaggagaagcttatggttaactaaagttaattttctccaggttctaataggatcgatctccttctactattaagattggggatggataataggttcatgcttctagattcagtgatatacattgtgtgtttgttttcaccgattaaaaaatttacattcattatcttcttttaacctgtttttaactctttaaaacttgtggcttctttctatctttgttgtaatgggatattctgctgcggaaccaaacattatgattagaaatgaaacagcacttacaacttgtatatctaagaagtgaagttgttctgagcgttgtaatttgtgattgtaggttctttggatcaaatggaagaggttggagagttgacaatccatgagggaggagactcttgtgaccaggaattgatacaaattgacaaatttacaagggatgtcgaggaagctgctattaaattacttgcatctaggttaattgttgtctccccttccctcctcccagaaatagaatttattcagtgctagactagttataaactgtattgtcaatccaattgaagagtttctgaaccaaatatgggcgagcataatgcttgttcattttttaagtgcaacaaaaatcaatttttgccatgctattatgagtttgcagttaattgttgctgttttccctgttgaggaaacttcctttttaagttttactcagtgtgtcaagtatttaccttctttcaacacttccattaagaaattgaagaaaatgtcaagtacttcatctaagttgagtttggggagggtacatgcatgcatccttatctccttaagggaaggctgtttccaagatttgaacttgtgacctttaagtcacaaggcaaaaaccttactatagtgccaactgccaaggctcaacatgaaagctaaaagacaaatttaaaacatagtatgtgttactttggcattgtagtcactatctacttacaaatatcccatgtattttttttagaaatttcaacttgattgaagttgtttgtatatttttatattgaagaatgaggttatgccgaacgaagtgttatcttatttggcatgcctttagaaacatcttagcaaattgtcattaacaatgaatttctttgagttgagtttgcttataagttgttaactaagagaagaaattttgtaataattagtaaactaatatcttttcccttttggaaagaggagtgtgcatgtttaaatgtaaaaatgcagtcttttcttttaagcatgcttgtctctctgttccacagggcactcacagcacttgagttgagaaagaaattgcttggaaagagattctctgctgatgcagtggaggcagtgataaacaagttccagagaaggtatgtagttaactagataaaaactgtggagagctgttgtttattagccaattttaattgcttccttacttgaagctttacttgcttccagacaactacttcctaaatttggtttcctttaagttttttatccagttacaacaaattgagagcaatatatgttatgttatgtgatttctggccttaaaaatgagatgtctgcaattataaattgctatcacaaaggtgactttgaatgcagctctagccaactattaattcagtcatggggtctccatgagaaaaatggctagataactggatattgaggaagaatgaatgtcttgagaatttgagtggcccatctaatataatttgacatatggtcatttaccaatttaagtcttatgtagtatatatgcatagagttgtttagttttttatacagcacgtagatcaacacttattttttcattttaatttattttgtgtgtcagaaactgatgaactatttttccacctttttttcattgaagagcaaatggatataacatatttggattacagaaaacagggaaaaggaatcaagaaatttaaagtgtgtttggtatggcttgttttgcagaaatatcaaataatcattttttgggcttcctgaaagtgcttttgaaaccgaaaaagtttcacctattctatgtgtttggactaacttattttgtattcaaaacaacttataataaaaaggaaattatgtaagtttgctgatattgtagaatgaaaaggaaatgatctctgcttttaccttgacattataattttaccaggtcacttgtggtgaagggtgattacttgtcaacaatcaactcactgaaaattgttttttagtatcttagaataaagaagagtgaagatgaacattaagtgcggttgtaatgaagatatttattaacacaaatcatggagtttgttttgggaatcgaattttgttttttctttttccattttaggatgtagttgtttgactgtgagtaaagcttcaaataaaggatgcatttgaaaatggctgataaacaacagatctactgtttttatatgaagttaacatgttttctttttccatttaacttttcttgctttaggaaggatagagactctgaattttttaaaaagagagtatatcctatgattaattctatattaattcaaacactattattttatatatgcagataaagtaattctgttctattcagaataaactgtgtggtacatgcatctcaatttttttttaaaagtttgcatatacccatttatatcatgttaatttgatattgtgcagtctttttcaaaatatgcttttttaagttcatttataaactgagtttgcagacatttttatactttatgtttacttatggtgattggtttaaccttttttgtatcagagggttcatcaatgataggttgtacgctgaaacattttctcaatctagatggacttcatcaagttgggggccaaggcggatcaaacaagttaatcttctttgcattttttgtttgtcctattactttttgctttcttacatgttggctgttccattctgcttttttatcttcttgatcaatacttcttccccgtgttttgttattaatcccattgcagtgcagaagaggaaataattgtgttagcattatgcttatattgtgcttgctaaaattcatcatcattttaactctagaatatagaattaggaggaaaagatgacgtgcattgtgacagcatcttgctaattcagcagagcagtatgcattcactttttttccctttccacaattactcttttgggaacacaaatgtgaaaatctgaaaatatatacttgcatacgaggacaatgttaaaataataatatatcatttactaagtaattatctgtatctgaaaatttagcttgtgcatgtaatctatattttgatttttccctacatctaaaagcttttgaagtttaattatgtcttttgcctgcttgacttgtgtcataatttggcttatttttcatagcgaattgttcaacaaatgcaaagcttcgacccaattcttttctcttgtaatttatctgatcgaataatttcttctattacttggctacttgttgagggctctatttatttcattttaaaactatctgattatttttttcccaaatatgcaaaaattgcctagattgaattgaacctaatcccttcccctcctccagaaaaggtaaaaccgattgattgaaggcttgaatcttctctactcatcattttcctcgagtttagatgccccaaacacactatggatgcacaaaagcagtgtttgcttaaaggttctttactgttgttgtgggccatgcaaggccaaggcacagacctttcaccccacatgccttcagtgcccaatagccatatatacctgctatttcatccaagggagatacttttgtgtgatggattgcaatttttgtggcaggcactgttcaataagggagttagtcaagctgatgctgagaaggcagttgaagtggtctttaaggacaatgattgtgccgaagatcacaagtcagttattggcttgtcaaaatattccatggatcatctttatactcaggcctcaaagcagtggttcagaggtcagaatgtactcaaggagacaaggaaatcacgaattgttcggtggcttcagtaccgtggctttgactggaatgtcattaacttcatactaaagaaattagacaggcaggaccagaattctccatagtgcacaattgggacatccaacattcatatccatctggaaattcattggtgggctccatacatgtttcttgaaaatgtatagtgtgtaatatggtagggttgaagcctcctttggctcttaatgctgttgcaagaaaactaatagttcattgcttcaatttgctcaaggccatgtggcatttgaacacacaagactacacttgtctgggtacattgatgctacctttttttcttgttgaggctgagacagcagcaagcaccactaaggaggtgctacttgttgtgagtccactgtgtcaattcttgtagatatcgtgtgatatgatatgatctagaaacaattgatgcgtctgcttatcttaaatgtgtgcttacgctagaaaaattatcaacatgcctatccaataacagtcattcatcaactagcattcagaattctagagcagaatgagtgccattaatgatatgatataatggcatgtgttgaattatttgattatttcataaagcgtaggagacttaaagggctagttggatgcagacgtgcagttaccagaactcttcaatagcaccacagaattttatgtaattttttcgttttaaatatatcattttattttcacattgtttgtttggtttagctttttttgaaagagtgcttattaaaaataagcaattattccctctaaaaaataggtctctcaagtgtgcactaagtttttccttaaataaaatttgtgaaaaatgcgattattcttttttaaaatctggaacacatttatgaggaattgcatagaaaactatcgactttaagttttgcttataaaaaaatatttttaatacattatttattattaggttaaatttaatgtggactttactaattaatagtaaattcaagttatttattgagactcttataataagaaaaacagtattaaaaagagatattaattaatatttttgtagaaaattttcaactaaatatgttaattaaatgaatttaactagaacgtatgacaatgtaaatattttttatactgttaattaattatataattaaaaattagtaattttgttataattaccttattagtcacacataaaatattatctaatttattaataacataattttgttaacaataataatgtattaaaaataaaatataaccatattagtgttgcttgaaaaatattcatcttttttttaaaaagaaaacatattttacagaaaagtaaagaaaaaaagaataaactaaagggtagaatttagtttcctctagtcaaattagtacaaatacatggatgattacaaattagtacaaaataaatggatggattaaaaaaaatgttatatccttttacaatatttttatcaaaatttctaaaacttataaaaaatagttttaaatgaaaaagtaaatgcatttaatactttgaaaatataaaaaaaatatctaataaatgaaaatattattataaaaggatttaaatttgttcataatacaattttcagtgtttacagtcaaaaggaaaagcaggaaaatcatattctgatgagaagaaatgttactttatgacaaatccatgctctaattttcttttctgttcctcctattgttgaagacattcattagtataaaataattgaaatcttcttgcaacttcattttaatttactttattttttgtggatattttaatgtacttaaatcgttattctcgtactcattcttttcacatataatgcaatgccacaaactctgctcctcaattatttccagtcctcttcgtactcttccaagaaatgccagaaagttgttcacgaaagaatcttataagatataactgaataagctttttggtcagttcagagaattttgtgaaccttgcaaatgataaaaaaaattcccttgttcgtatttgcaatctgcatatgctgctggactaactggtctatctgttttacatgttacctttcacatttccagaataataatggtcctgcatgtacatgtgcgtgtgattaagatacacagactttcattcattccaaacttaatatgtgcttctgaaggagtttccaattgttgcaaatgcaaagtctctttcagagagcacatgggacatgtgaggtattgaacgtgggaccatgtggaattgaaaggctgacttgagtatgcgtgcgtgcgtgtgaataagtgaaagagaaagagagagagagagagagagagagagagagagagatgcagcctaagaatcttattttctgtgtaatatccaaaaaaattccaatcattgtaattaatatcacttgttgacagattatttggataaacttaccttagaaaaaaataagaaggtgaaatgaattaaacttgtccaataagttaaaatcaacttatgtgctccagtttttagaaaagttagatgagagaagttcaattttttttttcctcttttaagtacttatgtagaagtttattaaaaatggacttttaagtctactgtgtttattagaaatgccccagttggcagtaatatctgagaagtttcagcacttgtagaccaggaaattattatcattttccatgttagttaattcaccacaaagactaaaatcagaacatcaaaatttgaattcaggtaaaagcacaaaggttacaaagatatcaataatgccaaggtgacttttacatcggattgaggaaccacctagcctgaaacttaattaatttgttgggtgaaaggctctagtctctagattctagaatttttttttattattattatttaaattgaatacatggattcttgaaatatgcattacatatcttggattaaatttgaacatctctagtaattcttctggccagctctaactgacattccatttgtatgcacatgttatgaatcatacgttctctatgagttgcatgcttgctcaacagattgagtcctctgagaaattaaaggaacaattagaagttccatgtgaaacacctttcataggaggtgctggagaagtatgcactgttaaaactccctttaatacatcaggacctgtggttgaggcctcaaaaggtcgaatttccttgagcattgcaacagtgtccttcattgttggacggtcctcggctcggttgctgacacatagaaatgacacggctagagtttgtagcatttcatgcacagtagaaacagttctccctctcagctttgggtcaagaatgtcataagggtctcctttgctagctaagtggttcctaacccactgaaccaagtgcgcacccccaagaagtgttgggtctagggggtgtcttcctgtcaggacctcaagtaggaccacaccaaaactgtacacatcactcttctcagtgatccgttgcatagatgcaatttctgtacatataccaaaacaacaaaaaattagtactatttcaaggggttatgcaagtaccgaaaaataactaattcaaacatagcgtgaaaaaagtacctggagccatgtatccataggagccagcaaggtagggtctttgaactggcttggaattagtataatcaccattttcacttgcaattcttgctaggccaaagtcagcaaggtaaggctgatagccaggacctaacaaaacattcatggctttgacatctccatgcaatatggaaggcacacaatcatggtgcaaatatgcaagtgcatgagccactcccaacataacatcatatctggtctcccattctggttttccctttcctgaaccatgaattaatgagctcaggcttccattagggagatactcataaaacagaagcttcatgttcttgctggacccccaacccagaagcttgatgatgttcttgtgcctaattgaacctagtgcttgaatttcagaagtaaatgctcctgactctgctgatgaccacatctttttaactgctagtatttggccatttggaactgtgaccttgtagacaactccagcgcttccggtgccaatcacattggatgatgtcaagttccggacaatgtcatcaatagagaactcaaacttctgatacaaagttatcagccaattgttgtttccattgagtgctttgttagcaacatgagcacggatcaagacatggatcgtgagaagtactagtactgcactggtgcataagagagtggacattataatctccatagccaatctggcatgacccttggcctcctttctgtcagctggagttgcaacaccaccaacaatgtagagaccatcatttcctgtgagatcgttgagagggagtttccggaagaatggtgtgttaggcaattctccagagaaatcattgaaggaaacattcagtgaaacaaggttgtgaaggtcaaagagagcatccaagttccctgagagcttgttgtgggagaggtcaagcactccaagttttctaagacttgagaactgagttgggatttcaccagaaaactggttacaactaaggttgagaaagatttctagtgaaggaatttgagcaacttccttgggaatttctccagagaaactattgcttcccaagtccagaagttgtaacttggagcaatataggatctctgctgggatgcttccactgagttgattctttcccaagttgagtttggttaattcagttaatgaaccaatggaatgactcagttcacctgttagcctgttgtctgagaggtcagttaactgcaggtttttgggcagattgtctggaattgagccactgagactatttgaatggaggtccagaaactcaaggttttgacatctggataatgttgaaggaatctcccctacaagatgattgctgctcacatccaaaaagttcaatttcttcaagttggtgatctcagatggaatggtacctgccaatctattgtgatttagcctcagcctgtagaggcttgtgcagttacctatctcaggtggtataaagcctgacaaatcattggaaagaagcagcagtttagtgaggttccttagcccaaaaagttgtttgggtattggaccagttaaattgttgtaagagaggtcaagtgcctgaagatcttggcactgggaaagactatctgggatttttcctgtgagcttgttctgccatgcaaagaagagagtcaagcttctcaagttgccaataagaggaggaacctccccagaaatagcattgttgtcaacttccagttgattcagggaagtgcaatttgtgatttcaggaggtataatgcctgaaagcttattaacactcagttgaagcccttgcagatttgatagcttaccaaaactggttggtatgctacctgtgagaagattttctgacaaatctatgacttcaagccgtgtgcagcttccaagctcttttgggattgtacctactatattgttttgccacaagagaagattctgaagcttgctgagctctccaatttgacttgggattgaaccagagattgagttctgatacaagtacaagttctgcaactcactgcacttccctatctcttctgggatagggcctgacagcagagttgtgtaaatggctatggtctgaatttttttcagcatccctattgaagaaggaagactcccagaaatgctggtttctgcaagtcctaacaccaacaagttggtgcagtttccaatgtcccatggcacctcacccttaaggtttgtgttccctcctactctcaacacttggagctcagttaaggagccaatactctttggaatttcaccactcagtttgttgtcatagagtgtcaagttcacaagacttgataaatttcctatgttggatgggatgttgccttcaagaaagttggcatgcagagctaaagtctgcagtttgctcagcctgcaaatttcctctgggatttcacctaagagagaattgccactgagatcaatgacaatgagctccttatagtctccaatttcctttggaaccatgcctgtgatgttggttgttgagaggacaagagtcttcaaggacctgagaggttgaaaatttgaaggtagtgaaccttgcaagttcactgacttcaggtttatctcaaccacctctccttgtaagttgcagtgcaccccaaaccaattgcatggacttgggttggaaggattccaagatgctagtgcatctgaagtactgtttaaactgttcttccatgctaatagagcttggccttgctcattaagggagtaacagcatggaaacaaaagagagtttaataagagaagcaaggtgagggagaagattttgggaggaagtgacagatttcttaagatgacaggcattgctgtgaaagaagagaagtggtgatctgttttgggattgtagagggggaaattctatgaattttttttatagaggaagagaagaagctctggtcagaagagctagcttccttgttcttttattgtgtaataagctcctgttcaatgacaaggacatctccatacccatgatgatgtttgttggtttttattaagctaaacttctctttttatttatttatttcaagatgaacctagggtatctctagacgagagtcaaagactaatctctcaatatattgaaatctatctaagagtctgaccttttccaatatatgttatttcttacacaaactctggggatccaacttatgaccatatatttaaggagcatagttatccgtcaatcatactacactatcttggtaaactcctcttttttattggtttgttgtggttaacgtgtcaagtagtgagttgaaatttttagaaatttgcgatctaaatgtaattcaatttgttagttcctgttagatagtgtttcattaatagtgaactgtgagacatgaaactggttgagggtgaaaataatgtaaagaagattttgcatttttgttccccacgtggacacatattttatattgtttcctgctttaatttggtaataataattacttttcatcttcatgtatttaatcagctgttgagattaattagcagcaagcaacggaaaatgactttagcacttttttgaaattggttattaatgtaattatcttaccttgctctagatagtgatggatgattaatcaaacagaatagacagtttgatggttgagtgtaatagctctctgttcggttaatcaaggagataatttcttcctttaattagctaggcccattttgtggtccatcgcttttgtgtggctgtagtttttgatgagccactgatgtggtggttgctgcatgctaccctttgaatttctgaactttaagcaactaacttgcatatttggatcaaattaccaagagtgcaacgaaaggatttggttccattgtcaaaatctaaattgggtatccatgattggtgtcaagtttactcaaattactgagatattcgtggtgattaattttataggagcaaaatggacataatttagttcacaaatagtaataagacacatttcggtttgtttatatatacttaaatgaaggagtgcgtgaggaatctgatggagaagtgaagtgcacatggaagcaagggaatacatgaagaacgatattataatatgtgcatgatctgttcataagtatttgttggtctttgctttaaagaaataaaaagaaaaccatgaaaggtatgttgaccaagagtggaaggtacaaatttacagtagattgaactattgaattggaattattcgcaaatcaaagctagataactagcaaaaaaaatgtccatttaaatacataaatctaccttcttaatttgcaccaaagtggtcatcacgtgtcacggtttaaaactagaaaatactgagattaaaaaaaaaaaacgttcttgtttttatgtgttgacagaattacaggtacagaagctacctgttccataattgccatgtacttgaagatgccttctggaagtaaaaggtattttcaacaccattttgtgcttttggggtgaagcatgtgcatgtgtagtgtagataactaccaacaatttataacatatttttaatataaaaaagagaactatacattcaataccaataaacagatagttagttaatttgtacagtaccgtgacaagtttagctatagaggtagtttagattgatttgattcaatgaaaggagaaaaaaaaaaagtttagattgatgggacatggcaaaataaacaggattatgattaccttatagaaatgaaagtaattaaggcttgtacgtttaatgcgacaaaggaaaagaaaaacaaaaagaaattctattgtagtgtcttcgggagtagaactcaaatgatgcaactcttctttaaacaaacaaaaattggaagccaagataatcaacgatccctaatccagtatatatcttattcaccatagttagagaacaaaacttaaaagaaagaatttaattaaagtgtatatatatatatatattaactttgtaaagatatttattctggcatttaatcatgaataatcatatatcttattaaattttataatgatagtttaaataaacatagttaaaattatttttaattgacaagagtttaattttcataaattgtcagtgtaattcttttactatcgagatcagtcaattagaatttattatcaatataaattttaaaataattattataaattaataatatttacatacatgacaatttataattaaattataatataaaaatatatactaccaatatatttaaattaaattcgaatccttatggttaggcacatgcatattcaaatttgaacatttcaaatatcttgagagaacataaaattattttggatcccttactctcaatttaaacatcatgttatcctaaaataagtttgtctataaaatctataaaaaaataatatgctgtaaatgaataatatatatatatatatatatatatatatatatatataatatgctgtttctactctctagacacatttacagctatatcaaccttttccagacacacaactttagggtaccgctttccccacctatcatataaatgaatcttgaagatgactgaagatccttatgccttatctaatttgaacttttatgactctgttctgtgcattatgaatctagcaattgcatgatactatcaaaattaatctttgccaattgtcccatctaccatctccttcattttgctgataatagatcgatggggaagtttcagctacacccactaatacatcatgaatcatcaaatcgaaactgtagacttaggacaagttttatttatgatatgcattcgtgtaatgtgtaattgacagctttggattcattgaattcaatagctttaatttaacggtttagaaccaaatagctgcttagatataggcttatagtccacattaatttgaccctaaacttaatcttttactaatttagagatggttgtgcataaaataatggaatttcaaagtaagcatattaatttattatgatgtatgatgacagaagatttatagaaaagaaaataaaagaaaaagtaatatttcatggtaaaggggagatcaacgaggcaaaagagggtgaataaagggaccccaatgacattaaaaagaagagacaaaaggcaccatgtatacatggatggaaattaattcttgcattagtatgaaacgatccatcctctaaccccaccattttattaattgtcggctttaaatctctttgtaaaaaagtagtcataaaggtatatatccaaccccaaaagaaaaagagagcaagtcataaaaggcttcccctgggggcatcttatgaacaatcaagtttacattacacatatggcatgatgtcatttttcacccaatagcaatgaaaaacaagaaggcccttttggatcacttggtaatcccatgcaagatgaattcagtaaatgaaaaagaaagattagacaataagaaaaaaaatgtgatgatgatttccacttccaccataaatttcttcatctctaacagagaaaatcataaataaccacagataaataattagctcctcttgaaaaatgtaattacgcaacacttctagctagcactcccatttacaccaagttatataattgttgattcctctatgtgattctgtcttaattaattaacatatcttataacccatttttaatttttctttcatgcttgcttgttaaattcaagaatttttttttttttaaaataaatactaattttcttttcgtttttcactgccccccatccacacacgcacacaccttcccttcttccttctgagtatttgaattccattatctatgtgactcataccacgacggttttcgacaaacatgaacgaaaattattgtttgtgtatatgaagaatcgtattttttaatctaaatcacattcctgctgttgtatatcgtactacatggatccaccaacatttgattaaaaaaaaacatgaggaacaagtcataagctaatcctcacaaagaaaatagccaggcacatgacatgaaacaaaacattgctggattttctatatatggcaataattaaaaatctaacctatacatgctgctgaggctgtcataatgtggtgcaccttatgtttagattgaagcattgcttatcaacttattatgatattcctgtccattaagattataatacccccccccccccaaaaaaaaaagctccctggttctccaatatttgtttattaaaagtgagtgtcaggcctcggctagctttttgttactttgggaaaacaaattaattgcataaggaaaagagagttgtaattatttgtaagataggtagcttctctttagtgataggttgttagctaggtaggagctcatgcatgctcatgagaggagaatatcgatcaataatctatttgaacaacatcagtggaaaattcaaatttgaccaacaatagagtggccacaaattataaatgtagtacgagtgtctaaacattattattagagcagcgcattagtattgcctatgaacacattatcaccactccattcgattacaatatgagccttctgtccatgcatgttcttattgtattgtcggaagccattttatcactgatatagccgcaacttctactactagtgctggaagatgggccattgatgtgtatgaaagaagctggccattatagagcatggtaattccacccatattattaaattaaagcttaatatgatatcacttacaagattgatagataataatttgaatcaatttatatgaaattattttaatttaataagggatatcaagtttaaatattaagtatctaattatattaaatatggtgaaggagaattttgttatttatattagtcttatttaatttgaagattgttttattacataaaaaagacatgtaatctctaagccgatttttatcaaattaatgattagtgatctgcacattaaattaagctctctctctttttttgtttatttatttatttttgttgttttgcctacctagtcaacattagctctttagcaatcatacaagcaagtgtaatcatacaataaaaacagaatggcttccccgtgccccaaattctggaaatatgagaagaatagagagagaaagatagcgagagattttatgatttgcattgaggtggaccctttgagaggtctaccagtatagcatcataggaacttttgtccttaatgcatggcacacgtgcaatagagtcagcaagtggtgaattcgatgcacatcaagtggacttttgaatccccaataataacacggattgatcgaaccaagcatgatttgttagtgacataataatgaaatcccatcaccataatattaattaattaataagccatatatagggtccatgggcatcaaaaatcatgtaagaagaattgccaagttacacttcccgaattcacacgtttgggaggctccatccctgatcaatatcacaaatcctttactgtttagaaaacaattgaaatctttgtttctttctaattatttggccaattcctccaatttgtgattgtttcccgaaatcatagagataagaccatataggtcgacatcctaagcaatttgtctataattgagatttatcacctaccgcattagcaaattaattcaatgtgaagggagcttagagaccattgccacccaatgagtgaatgcttaaagtcatatatggatccattaattttaattgtttttctctagatcttcactatactaatttttaaacctttcaaagtgctccactgagttttggcttgtttttcctccatgaagattccattattaaaaagactttgccatatccccgaacatagccttatagcttgcccatatatacatataatctttcttgcttgctttctttctttttttgatatattatacagaatatagtatttctaactccaataaaaaaataaatgatattaacctgctaatggattatatagtttggtgatacatatttacttgagttgtgctatttcgtgccaatagtttggtatgaaagaacgaatttgttactaatcaccaaataagaaaatatacacaaaatgacgaataaatgcacaggaaagtaaataattaacatcacgtcattttatattatctgtgcgaatagatagatttcttctcggttaaaagaaaaatatggtcttcaatttcagtctcattccaaagagtcagtttcactctacatattgttagcttgaaaaaacttcgtctttgataaaagatagtggtcctaaagaaaatcacattaaatcaagtgactgtttgatcatatcataattcatagctgtctaaatatatccgtaagttctggtttctgttcctaaatcactttccaaatgctataaattattatatgtaatgtgtgcatggaaagttagaatataataatatcatcctttacatatatgaacccagtactttgaacgtgtcctatcaactccacccacgagtcatgaatggtaagcccaggaattttgctgttagtactttgcaattaaataaactggctagctttgggtcttctggaggttagtggctttttttttttcttaaccattttttaaaaaataattatatttatattactgtgtttgaatttatttattttgaaaaataatattttttattttaaaaaaactattatttttctaaaaaaatcctcctgctgcatgtcagtcgtcaagattagtatgagcaagacatgcagggacatttatttgtcataactttgtttgaccgttaaaaatacaaaaaaaaaaaagtaaaataaaaagagataaataaaataatagtttgtttggataaatagaaatgataaacgataaattaaaaaaattattttaacttatttagatcagaacatttttatccagcataaaaaaaaaagatcataaattttttatccttaggtaaaaaaaaaaaaaatggaaaaaatagagcatgttaaatgagaaatgacctaactattattttgtggatcttacgtaaagaaatctctccttatggtgtggagagaaattttctataaacctcacattggaaaaaaaaaaaaaaaaaaaaaaaaactcctttcttacaaataattacaactcatgcacgtaaagtatgcacggaaaaaactcctttcttacaaattttctataccaattgagtaaaattacatattttatattaaaaaatatcttcttcttcttttcaaattctagttatgttgtacaataaatatattacgtaaagtataagtaaatatctataaaattatacgcccatgccagttaatgcgtaaatatcttatctattacgtactataatatttttgtgtggaaactcattgattttaagatcatctctcttcgttagagttcacaattaaactgcactcatcatccaatggtaaattagcttgcaatttgcaaaacaagttttcatattttattttagtagaaaaagaaacattttcaagggttgcaatgcatctttacagtgaaaaatttagcttgatcggatcatcttgttcacattaattatcttatatactttaatcatggcctatggtcgataaactagttctattcactgtttccattcatcattacaaagcgacctccttgccatcaagataactacaagtcatttttaagataacagtagttagaatcaatattgtggcgtccactgaaacataattaagagcgttgtctcgctaacttgttcaaagattcgtatgcgattcaaaaaataaaacaaagtcatgcagtattaattaattataaaccacgaaccagaataatttaacctataggtaatgtgttatcaaacaaaagtgggaccattacgtgcctaaagttttggtggtcttgaacctatagatttcaatccctataaaactaaaaataactatagagtttttggaaccattatatgtgcccataattttgattatatatattacattttagtggaagatatatacaatgtaatgatctccactatacaataatttcccctttgaaacaagtatttcactttaattaagaagataaaaaaaattaaggacttacataattacatccattaattgttcatattggttaaggtccacataaccttatatatatataatctgtcatatatatgtttttaaccaaaatctcaaccgtttagttatttatttatttatcaatcctcatagatcttcccttttatctctgacatacatgaatccttcacttaaatctaataaataaataaaaagaagccaaagctattttacattccattttggagatgggagggagccagggaacaaccggaagaaagcaacagatttccgtagcccatcaattagataatgttgactagaaaagaagaaagtgttaacttgcgattagaaagtacgatgcatgaatactactatttgtcatggtactcctaaatacttgtacctgtactaggcactattccgtaccacgataccagcatttatttataatgtatatataattagttacatataacattatgaaaaattgtatatatattgtgattgcgattttatactccatcattatatgttcttattttttttacatgaaatatatcttctcatgcacgtatcttaatatgtcttgtcaattttgtggaaccattaattgtacccgaagctgtaccaatggacttgtgttgtgttcctatatccatgcaacacgaatgaatttgttgtgcagatcgatctaggcggcaacaaacagtgaaatcataggaagagttggatgatcagcaatgttcatgttcatgggtcacttccaagtttcagctgacaattcacttgtttggacggaagaacatctttatgcatgggatttttgaatttaaaaatcttcccaaaaactattcccattttaaaaatatatatttttatgtctctatccccaattaattaataaaatatatttaagtggagtttattgtgagatccttaaaagtgactcaagaatccaaaatgtgatttatcttaaagtaaaaaagaaaaaattacttgcatcttgtatgacaccataaaactcacaaaaaattgtccaagaacctaaaattgaatctaccacgcactataagggtagattagaaatctcattccagcagatctgctagttcaaaagcctattgtaggtttcaagaataaactggtattattttagtttctgaacaaatgtatcgtaatactgttatataattactccttgaattctcacgcatcctcttcgcgctagttgggttaggactgaggagagtgaaaaatttttttttttttgttgacatatttgggcttaggtgcttttcggcccaaatcaaagtgaaaggggaaacacacttatttgggcttcaacgactcatccttcactctcccaatctaagtattaaccaaaatacttaattaaatctaacactagcatttaattgtctatacaataaaataaatcctaaataattatttaaacgcattttaatacttaaaattccattttttttaccatacacacaaattcttaatttacttaaatttataataattttctaaactaattgataggattctttttaattattttaagtcaaaaatataaatacataacaattatcaaagcatcaatagtaaaaaataaaataacaatttatttaatatttaaaaatacacgaaattagggaaaagaggatgccatacacatcacatatgataagagacaatatatatatatatatatatatatattactattcattatttttaagtttgataagaaaaagggtaaacttttagttcaaagtaaattgcatgtatttttcatttattccatgccaagtttaacctaagctttgataatatgaaaagatatcattcaatcatatagttaaaagacaaaaaaagagaagtgtaaatattaatgatctccacaaacacacacgtaacaatttattataatgttatatggagcacttgttaacactttgtcaagtgtaccaatttgtccaaataataattagacggtaagtccgaatgtcgatttcacatgacctttgtttgtactcagagttaatacacgttcgtttctaaacaattaattaatcaatttggttctttagagtaaatgacatataattaaacttgacctactaaactatgaagcagtgtaaatacaaataacaaagacacaaacactcagagtattgcagtgatggttgaaatacgatgcgatgtatgttgggagcttaactaatcgaaactaactttgatgcaatattaaagatttttcgctattcaatattattttccaatcaccttcatctactaatatattctagccatgattcctcaagtgcaagaccctaaatcacttaattttgctcttaatcccttaagagttgcattaaccaacttgcattaagattaaagataaacaacttaggctaaacaaaaccattctatccctagaaatggtacatttagaagtgtttttcaattataagaaaataacaattttccaatgtattaaaacctattacaatacatgaaaatgcatgatcaaaccactaacatgataataactcagaaaacaataataatgcgaaaatgacattgaatagataattagaatcattatatttggttgttgagctcccaacaatgggattctagcctcttattttcatatgagacttatacaaatggagggttaaggcaagggaaatggagtggatggagggaaatgaggaacataatgatgaatgacagctccaatggtgtggaatgatgtctccttcgtgacctaagtgcttgttttctgtctgtccaagtgttccaagataatcccctctttttccctcatatttttccttaaaacgcaacttagtgtcgtggtcacgcgcctagcgggacatatcgtgttaagcgtgcctttagtgtccagctggataaatgaccacgcgctaagcgaactagttgcgctgagtggatctctgcgcattgagcgagtagaccctcaattctccttccttgtccttgcagtgaatttttacaaaaaaatacaatcaacaccttatagtcaacaaaatttagcatctactggataaaagctcataaaatgactaattcctaagttttaatcgcaaaaagaagcattaaaaagagaaaaaaaaagagataattgttatgtaatttacatgtaactttgctatgcatagcaattatcaacactccatattagttgggaaagaatgagaaaaaagtgtaaaatataataggtggtgtgcatacttcttacttttatatttccttcactatctttagggtaatcacaatcaaattgattttgcaaaattattttttttaagtaaagtgatttatttatgattatagttttatttaaaatttaaagtaatagtaaaaattggtataattttttttcatctaatgtaaacctacctaaacatgctttaactcaaaatccattatgtgctcataaataatttttcaacatgataccaaacattggaacatttattttaaatcactaaaatccaacactttataaatgtgtgtttgattttatgttgaattgtctaaaatcatgttaaaatatcaactaatgttattttagataatcgttcacatattgaagaattgattatgtacacaaattgagttttaatttttatagacaacttttttattggataagaaaattttatttatttttaattataatttaaatcaattttataaatttaatttcactgataatcaattaaatgatcataaagcacaaaattaaattaaatcaatttaaaatgaaaagtacaataaggtccaacattattgattctttaaatatattggaagagatttaatattaatttttagtctccttaattttgtacttacattaatcaaaatttaaaaaaacacaaacttacaagaaaaaaaaacttacataaacctaaattgaaaaagtacaaactcacataagtttaaaaaaataaaaaaattatataaatcaaaattaaaaaatcataaaaaaaaaacttagagaaaccaaaaatatatcgtgatcctaactcttattttatatcttacctaatttaaaccatctttatatcatatattgctcacactatcttatttctcctatttatagagatacgttattgtaaggacaacaaactattattttttattttttattgtgatccttggtaagaattgcatgaattaggattactaaatctgtaattattagatttagatatatttaatattcatctgtaaacaaatttattaaatttcatcaagatcatttgatatatatttatttctattatatatgatatgaataatttgtaatctatcaaatctaatctaatggctgaaaacgaactaaaccaagtccacggcaaaacggtgatgcaagacgattagttggagcgtagaaggatctagaagacataaaaccctagccaacacttgctatataacttgccactttcttccattttctctaagcactccttccttttcgttctgttctagcatcttcgctgcaactctctaccttccctctttttccgaatttgaaacgaaatggcctcggagactgagacgttcgcttttcaggccgagatcaaccagctcctcagtctaatcatcaacaccttctacagcaacaaggagatctttcttcgtgagctcatcagcaatgcctctgacgtaagatttttatcgatccttgttaggtttttctatttccgtttgttgattacgtcctttactgcgctcgttctttattttcatgtttattgctcaaacacatgcagggtttgttggacatgtctttttccccccttttatttttttgtgatttctcttgcgtgcgtttacctgttgttgtcttcatagttcaacaattgatgtgttttttttttttttttttaatttgttagggttcatgttatgatattgtgctctttccattgttaaacggtgctgattattctctttattatcttaaatagcataattgaaatttattgagtttcgggtacataatttttgtccctgttcctgttgtctctgttatgtgagatttacgtagtactatgccgtttttttttactgcaaccattggatcttgattgaggcaaaactgatgctgttaatacgttcttctatttggggagtgagtggatcgtttggatttggtgtgaattatgctttatttaggttttctcttattctacactttgggccttatatctgattgctgacatgttattacctttacaacaatgtaggccttggacaagattcgatttgagagtcttactgacaagagcaagcttgatgctcagccagagttgttcattcacattattcctgacaagaccaacaacacattgtctatcattgacagtggtattggcatgactaaggctggtaagattaaatattttgttagtctttgtgagattatcgcggactgtgcatgttagttagtctgttttctctaatgcatgtgcgttttatgttccagatttggtgaacaaccttggtactattgcaaggtccgggaccaaggaattcatggaagccctggctgctggtgctgatgtgagcatgattgggcagttcggtgttggtttctactcggcttatcttgtagctgataaggttattgttaccacaaagcacaatgatgatgaacagtatgtctgggagtcacatgccggtggctcatttactgtgacaagagatacatctggtgagaaccttggtaggggaacaaagatgactttgtttcttaaggaagatcaacttgagtatcttgaggaacgccgtctgaaggatttgataaagaagcattctgaattcattagctatcctatttctctctggattgagaagactactgaaaaggagatttctgatgatgaggatgaggaagagaagaaggatgaggagggtaaagttgaagatgtggatgaagataaggagaaggaggagaagaaaaagaagaccattaaggaggtatctcacgagtggtcattggtgaacaagcagaagcctatttggatgaggaaacctgaagagattacaaaagaagaatatgctgctttctacaagagtcttaccaatgattgggaagagcatttggctgttaagcacttttctgttgagggtcagctggagtttaaggctgtcctctttattcccaagagagcaccttttgatctctttgacactaagaagaagcctaacaacatcaaattgtatgtccgccgtgtcttcatcatggacaactgtgaggagttgatgcctgaatatcttagctttgttaagggtattgtggattctgaggatcttcctctcaacatttctagagaaatgctgcagcaaaacaagatcctgaaagtcatcaggaagaacttggtcaagaagtgcgttgagatgttctttgaaattgctgagaacaaggaggactataacaagttttatgaagccttctctaagaacctaaaacttggtattcatgaggattctcagaacaagacaaagctagctgaattgctcaggtatcactccactaagagtggtgatgagatgaccagcctcaaggactatgttaccaggatgaaggaaggacagaatgacatctactacattactggggaaagcaagaaagctgttgagaattcccccttccttgaaaagcttaagaagaaggggtacgaggttctctacatggttgatgctattgatgagtatgctgttggtcagcttaaggaatttgagggaaagaagttggtctctgctaccaaggaaggactgaaacttgacgagagtgaagacgagaagaaaaagaaggaagaactaaaggataaatttgagggtctttgccatgtgatcaaggatgtgttgggtgacaaggtggagaaagttgtggtgtctgatcgtgttgtggattctccttgctgtctggtgacaggtgaatatgggtggacagccaacatggaaaggattatgaaagcacaggcattgagggacagcagcatggctggatacatgtcgagcaagaagacgatggagattaaccctgagaaccccatcatggaggagctgaggaagcgagcagatgctgataagaatgacaaatctgtgaaggatctcgtgctcttgctctttgagactgctcttctaacttctgggttcagccttgatgatcccaacactttcggtaacaggattcacaggatgctgaagcttggactgagtattgatgaagatgctggtgaagcagatgctgacatgatgcctcctctggaggacgctgatgccgatgctgagggtagcaagatggaagaagttgattaaatctgacttaattgcctgttttgtttttagaaagaaacaatgattggagaaacagtcttttaatatgttttatgttttttgaattttcgaaattttggaatgttggctagtttggtgccgttttctggattagtagtgtatgtagtttctttatggtaaatttgtgtccgctctctggccaatgaatttgtgctttcttcggataaacgtgtatgctgattgcggaagtttcagttcgggaatgaaaatgtttttacttctgagtgaaattaatcgctttgacgtggggataagaggattggtcaaatgacacaattatgagtttaaaaatgtcattcctaattaactgtttatgatttttttgaacgtttaaatatttgtttttgtttttgtttttgtaattttttttaatccttatttacaatttttttccttaaacatattagataacattttttttctgtttaaaatattttttattatttatagagttatctaaaatattttaaaataaataaatatattttataaagactaatgaaaaaaaattatagaaataaaaattaaaagtgttaaattacagaaaaaaaaatttaaacctaaattgaaaacaatgttgttgaaaatttttgcatttttaattactttaccttttaattattttctaaacttactatttgttctctcaaactcatttaaaagataaaagaaattatagacagataagtgcacctttatgttaaatatgtaaggacctttatatccattgccactttcttttttatattaaaatttaaacaatgtctgaatatttacatttttgaaaaatagcattactccttgttataattcattctcagaacatttttgcgttttttaggaataattttattttataaatatttattttgctttgaaaagtaataatccgttaatttggcaaaaaacaggtagtaatccgtatgcacctataatcttatatatagggactttcaagaatgaagattggctgcttaacttctagcataccctcacggaaggtaaaagaatgcgctgatgtcttctatgtatatattctatctatataataaaatataataaaagaaggaaggggcctgatcagtttgaaaattgctaattacacctcttttttgataagtttctcaggaaaaaattgaaacttgctaaatgataagtctcgcaatcctaactgataagtctcgcaaccctaactgataagtctcgcaaccctaactaataaaagaaggaaggggcctgacacccccatcagtttgaaaattgctaattacacctcttttttgataagtttctcaggaaaaaattgaaacttgctaaatgataagtctcgcaatcctaactgataagtctcgcaaccctaactaataagtctctcagcaaaaaaaaattgaaacttgctaattgcacctcctttttgataaatccctctattaaattttgatacttgctaattgcacctcctttttgataagtatactccaatatttccttttaaattttaaatgcctattatgtcttttctttcatctctctcacacattctctctttaaagtgtaggcagtgatattacctatgtacgcagggtatcgtactaactagttgcaaaactacaaaatttcaatattattttcatctttccttatggagagactctaaaccactggtgatatagtaattgtttgttggtgcatattgcagggtatcgtactagccagttgcaaatttacaagattccaatattattttcatcattccttttagagagactcaaaatcaccgatgatatagtaattatttgttggtgcatcttgcattccttcactactacatcgataccgttggtaagtatgttttctcatccttttggtcattttcacctttcttattgttacatgtatttcatatttgtttttaattttcctcatttttgtttaatggatttcttgatatttttcatttgagaaatcaaaaggattttgtccaacaagaagtcgtgggtatgtgttgattctcatccatcttttttttatcattttcacttttgtgattctaatgtcaaatttacaggcatttgatgcatctttcatctctctcacaccttttttatgttacatatatttcatatttgtttttaatttccctcatttttgcttaatggatttcttgatgtttttcatttgagaaatcaaaagggttttgttcaacaacaaaaagtcgtggatatgtgttgattctcatccatcttttttttcttttcattttcacttttgtgattctaatgtcaaagtttcttggtgtttttaattttaacattagtaagtagtcatggcctcgtgggtaagtgcagttgttgtctttcattttatattatgatttctacaatctcctcctttgagtccttcatcttttgttatatatatatatatatatatatatatatatttttttttttttattgaaggttttttttattattttatttcagaagttagaagctctatgaactaattaaacacctattgttacttactatcattctttctcaatgttgttggttcttacctcaattagttgagtctaattattgatagatttacaaaggtgtgacaagagatgaagccttaagtggatcaatggcttaaggtctgatttcaagagaggtatattatcacaagaaaaaaaatcattatttaacttcatttcttttttttttcctcttatttttgctacacatccattttgtcattaataaactatgctagatcttgcattttttaaatatgtttccagtctagatggtatattgttttaactacatttttaagagttatgtgtgttcaaatatcttctttgagaaatatgacttcagctctatgcataatcaaaaaatggtaaaaaaaatattgataataatgtatgttatattattcctttttgtattttttctattctatattttattttattctttaacatatttaatattaaataatttatgttcactaaaataataacatttagttaatatatattataaaataataatttgattctttgttatataacggtcaaagttaattaatttaaattattttattaaaaatatcataaattaaaatacttttagttaatattaaatatcttttaggcatccattttcttattttttttaaaatagacaacatttattagtttttgtttttatttattaagttctaaaaagttacaaatgaatatatatacaattatattatatatttaacggatacaattaagtatatataattatattatacattagattttatgacttaagagtatgtccacacgaatactttactagttagctaaacgtggagcgtcttcgtctcaacatgttccagttttggagcagtctttctgatgttcaaatgcttctcttggcagatgctttactgtatgtttatattctgctagtttggttgcctattttattatgcggaatgattaaaaaaaaagatgacataatatttttattattattatttataaaaatccataaaatttaacagttaacatattatataaaataaattaatataattaataattgattattgaactctttttaagaagtttttcttaggccccaataattttagacaaggccatgccatgatctccgtatccaactttccaataggaaaaaataaataaaagtggttaatatattaaaaataatgtcaaattatttgtacagtatcagagtttaatccttgattaaaatacttattttttattgaatttcagattagtcaaaatctcttttagactaattgaacgttaaagacaaaaaaataataataaagtttggcagagtaaaagagataaatcaagtaaaaacttatcccacaaaaaaattaattataataatatttttgttattaaaaaacttattttactacacgtaagttagttaacatgagagttctttccattgaaactttgcaatattcacaacatattcaagcacagaagccaggcaaggctagtattgagatttgagtgagtggttagagctcattgcagagagattggagccaacagagctggcatggctcattcctgaacggtggtgccggcacctgaaggatccaacatgtgtggtgggtgagcatagacaattcctcctttcactcgaagacttcttcaatgcagatgcagcttgaggtgttggtgacacagacacaaccatatttgactgcttattgatataatccatattcaaaccaggtatttttatttctttaccattcagcttcattagattcatgcaaggggactttttctccatatttccctccatccctttcctgaccacgcatattcaattaagaattaaccatctaacatttgagcaaatcaacaactaaacaatttaacaagataactgcatgtggttggactttacattttttttttttttgggtgaatgactggggcaatcagctccaagaaactagcttaaaaaccacaagggaacacagtcgagcttacatctgccataacagcaggtaaaacagaatcataaacatgccaatcatcatctaaagacattggtaaaacagataattgcacggttggactttacataacagctgcatgtgttagattcttaaaaaatgtgttaactgctaataatgtcctatgccttgtgtctaaggacatatatgcatatgatggagatcaaagaagagagttagttaccttgtgatgcgcttatcttaatttccttgttgtgttatgattttctttggatgtgtgctatataatactactatatgatttgcttatgaagcaagatatcacgaattaaagacatggtacatgcataatgctaatgacataacaacaacattaaatcatgtttcatgacaagatgcttgattggtttccctcttatgaatcatgtatgtatactttgtaaatgttgattgtagggtgaagccatatataatataagtgattaatttatacctagatagttgagaaggcgtgtacaaaatatgatgtccttccgcagatgaattgcttggttcacttgaggctttggattctctgcaacaatgtagagagggagggcccctagtatgatattatgcttcctctgaagattcagaaaacctcagctcttagatagcacaaatcttgggcgttaaccatctcagtttcgttgtttcaaatatgtggtatttattcaatcaacaatttatggcgacaagttctcaaaaagctctgctggcgttttttcttctcaacctagttggacatgagatactatgactatgataggtcttttccttgatatgattgacaaattggcaataatttaacagcttccgtgacgctgtacttcttttggatattctttatttttcaccattttgattctttattgtcacgttgacaatcttaagctaattttacagcgataatgccttcttgttgcttgttgcttcatattattgtgctttttttgggttggtttgacaacttttaggctattttaggacaagaataacaatacttggataaatttatttagtagttggttttatttagttgtgaattttaatattagatatgcaaaataaatcatatctgttcattcgatatcaacacagcctacatcaatggcaatcaaaatattctggtagaaggccgaaaagtagcatgtgtacaaagactatactaaagagtggacatttttttttttttttggcaatttgtttagggggaaaaaccctaaataatggacattttattgtttaagaattaaggaacgaatatattacttgctttaattttttccctacagagatgcagatgcttatctaacagtatttagatgacaatacaagaaaaatcactaatttgaatggttatgggatccattccttacaaccaagtacacattatagttttggtcactggtgagctactctgtacatatacaaactcactcaagtgacacgtgtaaagtatattaaaccaaaatttaaggaaaagaagaagaaaaaactgagggtaatatcaagagtatacatgtgaccaaataagatcaatccttttgactgttgtttctgctatttctacctctctaatccttgtttgcaaagagggcaacatgatgtaatttttagccattgatccacacattttaggtggaacatatgggaacagggcaattgtctaacttcctctttgtctttgtacttggctaagcagatacagcattcctgtaagcacatcagaacataacaaatctatcaattcaatagaaattgaaatatgacaaatcttaaaatgaatggaacttaaaagcatacatccaaatcgagggtaaaaatgcccaactacattactagctgttaagtggctagctagctgtacatcaagtcaagggctagtaaacaacacacttgtcatttttgtctcatttagcttttagggttgcattacttgagctctattttgatacatttctccatgaaacacatgaagtgcataagttcattttaatttataggagacgtttaatttattttatctttctattttcttctagtaaaagtgcttgtagaaaaaactatccaaataaggcctagtctatatctactaatggtaccacttactgggtcttcattgatcaattgtttactgccttcagagccattgcgaagctctaactctacaccggcttctttatgtctccaacttggaagttgtgaaatttgatcatcagaagctcctttattggaagaggccatgttcatgttgtagccgaggagggtgctaattagtggcacacagcagcataacaacacaaacagtaggaaagggaaagagtagcacattgcattccaagcaaggagaatgatgcagagcacatggagctttggagcatgatgaaaagatccaaaacgtgagtcaaaaacccaaacatttcccatcacaaaccatatggcgaagaaaagctcaagtgaagtccggcatttattcatcaagtgtgacatcctgtacaatacagtgcaaattaaaattacaacttcaaatttcaaccaaaaaaaagttgcatggctctaaaaataaaaacaaaaacttgtttctctgattgagtcaatgacttctccaacatttattttcagtagggaaactctcaaaagcacttctgacttgtatccaaacaggtcttatatgaaagttatttcagacaatataatacaaatagagtttacaatttattttttaattcctaattggtactgttaattcttggaaatggttttcgtcaacttgaaattacaatacattttaatagaaaaagaagttggtaaaacttctatattagtcttttcaattttcacatgatttatatcctcaacgagataaaaaaaaatgcaataaacaaaagattctactctttcaaaagtaaatgccacgaactgatcgcagtgaaaaaggtatgtgagggtatttgattcctccaagctctttttaaggggataaattaaaattatgataactttatgattacttgacacttggtattttcctatcttctaacaatccaacttgttttgtccaaatattatttataatcaattcaaggagaacaatttatttttatataacagttatatttaaccaacaaaacgatggtatcaagcttttctagcaaattttagagcatactcatgcattagtacactataatatagccaataagtacaattaattacccattcctaataataaaattgtctgaaataaaattgttgaaggttgaagtgcacaggatacctggtttcttcattgtttctctgctgttccatatcagaaaggctgagagaatctccttgagttagataaatttgacggtagcgtccataaagtagaagcagattaagaacacagccaatatcataaccagaaatccaaatcctcataggccaaataggtctctccctcttggaaatagccaaagtgaacgttgtaatcgttatttggagaatcaaggcaataaactccagcatcatccaagtgctagaattgaaagggttggagccaaggttggaccttgatccattttggtaatgaaaaactcttctcaaaaaggcaaaccatctggctctagatattctcatggccatccgaaccataaaggaaggaggggtgacacgtggaggcctgtttcgagcactagccactctatcttctgaggcagaatttgaagaaaatggaaccatgctatactcttgttgtggatgaacaaggaagcacctagaattcattggaaatgttttcttttgcctgtgtgtgttgagaatttgtccaagacgtgtatcagagatcaagtaattgaatccagcagcagtattaatttcttaaaagcacaggttttcatcaaaagaaccttgaaattgaagcatcccaattggcaactttgttgatggatggaactagtaccttgattggaagatcttttctgggtctgcaccacctttaactcctagcaacataatcagacaaatatcacaaaaagcttcaataacatgatcctttcagcaaccacaaactgtagagaaaggttaagaataggaaaaatatgaagaggggatggagctgatgaagtgtatatagaagaggaggaagggaagattggtgtgaaggatatgtcaggaaggtgaggttgtgtctcagagggtgacaaagaatcgaactgctaagttttgctttgattcgaagggaatcacaaggtttggagggaacttaaccgttggccaacttcctctaggctttatttttatatgaagccaagctcagaaagcaattggacttcaatttcccttcttttctctccctttctttgtcggctaaaatattttgatccgtaatcttattttttgtttttgttttgttcccataagtttaatgtccattttttcgtcttcttgccaatattttgttaattgactgaaattttaacttgaatctaaaaaaataaaacgagggacccaaaagttattttaacattgtttgtttgtctctttatatattaaaagattatcacaaacgcagatttttattttatttttttggtgaaaataaagtgaagtctatctctctttgaaataaagtgggctaagacttaaaagttattatctgatactatacgctgggcatttgtttacattatggccaacaaaatttcaaccttttaattctttatatgataaatgaatcataaaacatgatttgaattctggcgggtacagttgatattttgggattatgtggtaaacggttggccacctaatccaaccaacagttaatttgtgtcacattggagtagtgtggccctccttgtgtctaggaataattgctatgttttacgtattaaccacacaactcctaagtttcttctttttattacatgttgtaaattgttctaattgaagaaaaatctttgaagttcggttaattaagagtaagattaaatcttttgtaattgtatagactcatacaggagcgaaactaggttcttcgctatagggacagtcaccctccgagtaaataaaatttactgtcacccatccccatgaattctaatattgacccccctccctctcgatgaattttactatttcttcttttttacgttgatgatcagtttatagttttatatttctaccagagttcttggtaatatctgtatcttattttccaaagattccagtattatctagtcaacacgcgtataaattaaaataataaaatttgatttcaaatattaactaattaattatttcatatgctataaataattttagctattatagattaattgcttttaattacattgattttttggtacaggttcaactatgttaattattttcgaatatgctttatcatttatttagtaggttttaaattaatttttttattacattttaaattactcttaatttgatagataaaataatttaattttgagaaaaattatttttttttctatgaatcattgtcaatttatgtgttaaatttttgcctctctatcacttttttcctgattccgccactgacctcataggtggcctaacctaagtttaaacagcgccaccgatattttttttcagatgaaaataaggaaccgctagatggtttctaaagatgattgaatgtagagttgtatgagtacaatattattttgctacagtgaataagtttatttttactaatattataggtctgtcaaaaatgtgtttggctaacagaacatcagttgcgatgatttctatagtcgttagtttgactcataaattatagtcgtattaggccataactaatattctagaatcaaaattaacttgtgggatcacgcaagccgaatgggtcaccatccgctgattaatgtaggagaaagtagggctagcagaagtaaaaacaaacaaaatttgatcatattgctaagcaattattggaaactagatatagacctatgcattgaacatcttaaattaattttttctattgatttttctatttcttcgtatgtggtcattttggtgcatacatgcacttgatgtagagctagtgttagtctccatttgttttagtcattcaaaaagcataaactaattaaagagattaaaattacttaaaaaaaaaagagatttttttggttacatgtttttttttgttacaaaaaaaaaacactgcaacgtagaattgatcattgatcagaccactaaaatattaacattgcaacgcacaccttggcccctaaaaggaaaattaaagtatatgggtggaaaattaaaaggaaaaaagaaatgaaaacgtagaattgtcgacccaaactatcgattatacctaattttctatttggttaccataaatccaaatcaaacgtgggaaagcctaaattagaggccaaaaatttgacggctaaaggtcaaattcatgcgttgttaatttacgaatggagcaaagtgtaaaaatttcaaatatacattttatatgatccttagttctaaatagatcagagaaaaatcattttgggatcaatattaatttttaatttttaaaaaagaaaaaaggtcgcgtcaagtttaaaatcaacataaaataagtggccttaaccctcacgactaaatgctgaagagctactacataaaaggaaatcagagagggaatctataaggaatgagcgagatgtttaatcagcgtgataattaaggttacttgaatgaataaaattaaaccatgcgttaaccattaagaatttggcaagtgttgctgaagtggctatattccaaagaaaacatataattaacaaataaaagacgtcgattaagtttgttttgacgtattaggatcaaatttgaccccaatttgggcggtgagacatgcaacgtgttagtgttgacgtatcttgcaaaggaaagcaatcactttcggaaaatggataagaaatgggaactgttgaatttgaacacgaaacttatcttcatgtatacacggagaaatcaaaaggcttcaaagttgaagcaaaaaggttgattacgttaatttgaaaagtatgcaaaatcatcctcaaaatttcatgtgcttgccccggttgtcctcgtaccaactataaattcacaaaacttctaaaccaaatttaccatatgctgtgcatcaatcacaaattatattagaatttacttttacaataattattgtaaaaattacaaaactccaacatcttgattaaaaactatttgactttgaccaacttcgaacagtagtacatttggatggttctccaataaaaggtgcatgtcacattctgtatagtaactaaacaattgcttgagttggataggttagatttgtacgcgcatacaaatattcaatataattgagtaaaagtcagtcacatacatgcagcttccgatttcaaggcataattatacagcacgaatttgttttctcttgtcaattaagtgtatcatcgttaaacagtaaggacaaaaaaaagttgttgctagcgggggtcttaattaccgacttcgtctatcataatattgtgcacaatagattatatttgaactgctttttcagactgatattcaagttaatgatcaacgaattacaacaactggtctgcaacaaaattgactacaataattatatggatttatctattttcaatttttatataatagaaatataatttattctccccttttccatatatttttaataagattttttgaaagttctatcatattgtgtcccttaggtaggatcatgaggtgatctttaagaaccaattaagctcttggagataacaaaagaaatcagaaataacttcaaccgaaagtttctgcataatacatcaaataatactgtaataggacttaaggttttgttctaaaaggaacttggtgggtctacgcaggccatgggatgtacatacatatacatgcgtgatattaagttcttgacacacatgttgcttgttacaaaattccatttaaaaattccgtgagtgttatttagactcctcactcccatcccatgtgtttcttgtgctctgctctttcgattcaggataatgcttaattatttacacctcacgtggcacttacaaaatatatcatatttatagcatgtataaattataacatatatcctacttatatattaaaattttatattatattgttttaaatgaaaacatgtttaaatatcctatttacgtaatccctaattttttagaattgtagcgtatatttttaacccgcacaacacatggataaatatcaattttaaattcaatttagccattatgcaaaaacaaaatcaatttaatccttatttgtaattatgtcctcactgattgctacatttatatcatcatttattggaattacaacaaagtcaaatgtagtaactaatttagttacaacaaacctaatcatttaaatttgtaattttttttactaaaatgtatcaaaattaaactatctttatgtaaaaacaaacattttttcctgcatgcaaaaaaaacttaaaaataattattctggacattttaaacatgtgaattgtgaatatctgatccaacgtaaactttgtgtacttatgtgcatattttcttaggtccattgaaaaagtatgaacagttattgaaaaagtatgaacagttagactttatgtctgacagtaatagtagctcttaataattagacaaaaatagtttttgtccaaagtatactttgatttttcttaatttcagttctaggaaaacaaactcctatgttatcaatcacaataatcaaatgatatagatgaaaagaataagtacaaacaaatgacggcctagacaggctccactgctagaatggcaaagaacaatgtactagcactctaccagacatcttcaaccgcaaaaatatacagtcatagacacaaatagaaacctaatttgccttctcctttaccttgtcatcaggtttgcccaaaacaaattcagcatataaatccttcagagcaatcatgactgtagttatcaatggccccaaaatagctccctgtggaacaacagaatccttcagcaaatgttatgaaatacgaggaaaatgcatccatacaagttcactaataagccgacccacacttgagctactacacctatacattggatcccacatgctcacacacaaaagttacacaagcagataaccatttcaaacgaagttgtgcaggcaaaccagtctaaattctagaacaaatataggttagaaatttcatgttaatctaaaaaattacaatgtaagactattagtagttcaaattgagtaagaaaagagtaaatagtctatgtacactggtagtataaagggtttttacattgtcatatatgataaataagtttattaattttttttacaataaagtcatacctctatgagagtgcataaaaattaaacactaaagaaaaatatcagaatatcaaaacatggaggggtaacaatttacctctagagctgatggaaacaaagccattcccccaatgatgctcagtccagtaagatatgcactgtgtccaggcacatcttcaagaatctcagttgccccataatccatgaggaaaaggtgagcaacagacaagaaaatggccactatgtatctgccttctagtaccagctgtagtgttgctggaattgttgcaagccaagatggaaatattggtagcaaagggctaaggaaggcaatgacagttgacacatataagaaatgtattctgtatagcctaaacaaaagccaagtcaggcatccttggaagaatgcaatctcagcagtggccaaaaggactcctgaaatagccttatccaacacttcaacacacctgaccctggccgagtttgacatcggaaccatgttcatcacttgttctgttgccccacctgactctgatgtgatgagataatacaaaacccagaaaaacaccattgcctgagacacaaaattgaaaacctccgcagcaccagagactatggaattcaaaatggagatcacaaactttgcaccacttccaagcacacttgtaccactagccaaaacacgctgaccaacatccatccctttaaccgcatacccttttgccttctcaaccaaatcccccctagtaattataaggtcttggaaaagggtatcaagttctgcataaatctccccccactccttattcctaaccctacccttcaaactcaagagcttttctgtgtatggtgaaggcaccattaacgaatccgttgaagaagagttagcactagcactagcaggagcagttatcacaaactgcttaataaccgtcacaaattcagtcagattgtactgcattgccaacccatcaatctgatcagaaaccgtctcatagaactgactagtgtacttatccaccatcccagcaacatcattctcctccatccacttcttcacaccgattctctcagcgtaattgttctcttccactcgaaccttcagcgaaatcactgcctctttcccttcgccgccaatcttgtaagagaagaatataaccccactcaagaacccaacaatcatgccaacaatcaacccaacagccacaacggttttcaacctcttcaatacccctcttgtgaaaaatgcaccagagggaaagaaaagtgagaaactgaaatccacgttcttggaactgaaaacaaagcctaatcctagaagtgacagagacccaacagcaccaagcctctcataagcagcaacaaacaccccaaaggacaagagcaaacgaagcacggtggaaaagccgctacgcttctttgtgttgtcattctcattctcaggctttggcttcctgagaagggttctgagagaagcttcacgaatctcaacaagggttgtaatgaagagcgtgaagacggtgaggggaagggcgaggagggtgtgaaggaggcctagattgagagggtgagaccaaaagcaaacggtggtttggtgaatgagtctgagagggatggaacagagaacagcccattgaaagggtttgaggtactgttggaggagtttgtagagagagaagaggatcagaatggccatggcgagcccggcgtgggccatggctatgtagagggccaggcgcgcttgagactgagagtcgccggaggggttgactttttggtcggcatttgacggcggcggcggaggaggaggaggatcggaggtgggttttcggagggatgcggatcggaacatgtcgtgccacggtggggtggtggtggcagagttagggtcagagtaagggacaaggtccatctaagaacagaacagaaatagtagtgaagtgcaaataatgttagtgaatgaatgtgttatgttatgggtgtgctggctaaggatgttgtgtctgtcagtaaggattgaatggctaataaaagaaagagatacagtaatagtagtatcatttgatttccaagttttgtggtaaaaaagtgaacactgcagctttttaaactgacaggaagtaatagtacgaactatgaatatgaagtgaaaagattggaaaaaaaaaaaagagaggaagaactggtacttggcttcgttcgtgtcttatgttccattgcggcattgcattcttcacgtgcccgcaagtcatcccaatcttcatcataactaaattagtatgagatttcgtaagccattaattaattaagtaatcactaacagttttatcttatatctttaaattactctactcacgaacaatactgtaaagtgtatatttttttcttttgtttaagtaaaaaattaacatgtaattcttttcttttaatcgaaaatgataaggaaattattgataattttaaaagagagttttatggaagaattgaattataactcaataaatttaaaatttatttttttaaggatgagatcaataggtacttttattatttatttatttaaataaatattaagatgtatttatttttaaaaaatattagaagagacaaaattcaatgggtctaatccataactaatttataaaattgaatcttatctatcttacaaatatatcaagggataaataattgatccaattattagattttttttaaggctttaaaagagtcgtattattaggtgaaaactttatgtccaattctataacaaagattgtagcaataatgtcatgaatgactaggattatctaatttttttttttttaagtataattgatatagtttatgcgcaatcaaaatataatttttggggtggaatttctgccatcaacctatggatttgatcatttttctaatatcttctatagtaaaatgtgaaaaagtacctaatttaacggaaggggaagaagaattaaaatatttaatgtatcataatgattaaaatgtacgtattttaagtaaaaggttgataaagtatggggcagctacttttttttttttaaaaataaatttatagtttcttatctacatttttttttaatttggttgctaaagtttaaaaatttattttatttcctttaaaatgtttgttagaacaaattgctccttagtttttgtcaccaatatgtcaattttggttgatatgacatacatttatataatatgacatttttcaccgtttgccacgtattactaagttaataaattagtatgagaaactaataaaatggtcaattcagtttaacatagacattttaagaaattaaagtgatagctttctaaatttaagagaccaaactgaaataaaatatgtaaataagagatcaattttttttttaacttttctttatggtatatgggtcaactaatctatgttacaacagaagaaatggaagaaaaaaaaaacattaatttcatttgtagattgaagcatcaagccgtaaaaaacataactctgttatgaagcacatttctttaaaatggttggtacttggtagagcttgaatacagtatttattttttcttgcattgcgttttttcggctactgtttatcctgaaaaggcaactagacagtagacaccagcagagacacactttttttctcaaatgttgctgtttagttaacaacagcatagaagacatgttgttcatttcatgagagactaattgcaaatgtcaattcttctgcggagacagaagtaagctaacacgcggaagcatagagccatggctaccagaacccatgcttcagttaagcctccttccaagtctacagtgtcaaatgatggtgaactctgcagtgtcctgcaccctccttcgctttcacactcatatggttgctctcctgaatactgcacttttagaagtagtctgaacccatagtacacgaacgacaaatacttcaaccaatgcatcatcttcggtacgtgctgcatgcaacacaatcaagcgttctgtgaaggaaggctagcttttgaataaaaaatgagtacaactcttaccaaatgatcatgcatgaatatgtcacttccaaaacaaactaattattggtttatgtgtgttaaggcatggatgtgctgacgtgacaatgcattaacatatgaaccaaaattgtacaactaaaatagtagggattaaattcacgagaaaaaaaaaagatttgagaggcaaaattcgtgaaattgagaaagtagggagacaaagttgcagttaagcatacaaattacaatgttgctactccttgtgcatagcatacatacctggacatagtagccacctgtgagaaggaataacattagtatcaaagaagcaaccatccctgctctttgaatgctcataactgcagctccaaatagttctcctgccccctattaacaacattgtattcattaaagcttcaaacaaaaatgataacacgtcgtttacttattatgagtctcaacatagcttacttgacttgttatagctattaaaagcaccgcgaacaaagtcaggaagaagcaagcaacagtgctcttaaatccggccatgaagtacaagattaacatgaaaaaagtagggtagaaaacatgtgccaccatgtcacacagagtgctgcttgcatagtacacactcagtctatacatgtctgcttttctttctttcaccaagtaggccttttcaaatggaaagacatagactgctccaaaaatacatgaagatgtccagaatatacatatatagaacattaaaccaacctgcaccaaaaatagtagttcattctaatgttaatgttgaagagacaggtagagcagctcagccttgaaaaaattgaaatcaatatcatggaaactacctgatctctaacttgagcctctgtattggtagaagatttccaccaaagtaatcccaacaaaagtgcaatgccaagtgcttgaactagtcttaatttatcaaaatagtccttgcttcttgctttgaatgttctcttataaagaataacgaattggtcgcaccaactcactgtccagtcccttttaacctgaatggctagctgaagatgttctggtgtgtttgctgctccatgattctcttctttttcttttggctccagtgtgtctttgtacttgagttgtagatactaacataaaataaaggatcaattattaaatagaaatgacatagaacaagcatataagacttatataatacataaatctaacgttaataacagcttttgaagagtcagcagattcttgatctttcaaaatatcttgtcgaacgcttatgttattcacttgtccagttgccaagtcaagcaagaactctgcaggattcattggtatttccgggatgaacctcaaggatgaaaagtactgcattgagtccttagccttcccgtagtaaatgggatagccttctgatatcagaagaagtttgtcaaacatgtgaaagattctgctggatggctggtgaattgttgtgattatggtccttccaccctttaggcaaatcaaaagtaaattgtggggttatagaaatgaagcatgttatcaaaatgacagttaaatatagttactgataccttggcaagcccctgaagagttagaaggagtctgtttgctgaggtggaatcaaggcccgaagttggttcatcaagtagcagcagtgaaggatcaacaaggatttcatagcctatgttggttcgcttcctttctcctccagatatgcctttcagatatcctccacctatttttgtgtggcggcatctatgtttatataagagattatttagggaagcagttttatttcattctttgcttgcggcttactcgaaatcataataactaatttttagtcaattgtggaagattcaaagaatcaattaatgtaacacacctttcaaggccaagatccttgacagtgttctccactctagcatatttttgttgcttgctcatattgcttggcagtcttaagaatgcagagaagattaatgtttcctctactgtaagttgtgggaaaagcacatcctcttgtgtcacaaatccaatcctataagtcagaaaaagaagaaaataaaacaaaacaaacagaagagtgcttatgttctgttaaaatataaaagcacatgtcatgacatggatgctgatgtctatgaagctttctaacctcctcttgacagctggattaaatcgaacatcattataagttatcttcccctgcacattgtcaattaatcttccacctataactctcaacaaggttgttttcccactaccagaaggacccatcaaagcaagaatttcaccagggccaatgcttcctgtgatactcttcaaaattttcttgtatctatcttcctccacgtggtgttgtgtgcctacttttgacatcattgtcttcacagggttcttggaagccgcttggctatccctcaccttgaactctacatcttcaaactgcacattaatgagaattttgagagcaaatgacagtaatcataaatacacaattaaaacactgttgatgagaatattcttattgaaatcaattttcaatatcaagtggtaatcatcaagatcctcaatagcattgcatgaagaactatgattctcataaaaagaaaaactttgctctaatgcaatcgaagaaaataacatatggtccatgaccatcacaagtccatggttctggccgatttctatgtaccacacgtaaccgaattttcttaactcttgtaaattgaaaaactcgattacatgccacatgaaaattggccgaaaccatctatatgtggtggtcctgaaccatactataatttctcctaatgcacgtggaaagaaaattctaataaagttgtagaatttagccatttttctctaccttgagataaatggggagggggggatcttggtcgaaactgaaatcctcaacttttatgtcaatctctgtgtacatatttggaaggtatgcctgagacatgaactccatgctgtgaccaaagccattgctccctgcaatctgcatggagccaatagatggaggtgacattgacatgtcctcaatctcatcttctctttccttctccatgatcttggattctatgagaactttgttgaagccaggtagtctaataatgtagtttaattagatatatcgtgagtcaactgcatcagaccaagaccttgcctatatattgaggcagaattttagttggtgggccacgtacttttcatgacaagttcttggtccatgaaaggcatggatgttattctcacatatcctttcaatttaaccattatcatttgtcataagaacatgtcaagaacatgaataaattggcttggtaagtaattgaccattaatggaatacacgctgcatgtctttaatctcgtgtctatcaaattgatgcaattcgtctcattaaaaaaaataaaaatagttcatttacaatgaataataggctaaattatgtgattgataacagtcatgtccgtaacggcaatgccattttgtagattcacttctctttttcaagtgtttggtgctttgaagaccatctaatatttgtcatgtatactttttactcacaaaacactgatgtgtaaatcagtaaatctatttgacgactcttttagtgttgtgggatggtcaaccggagtcacgggtataatttgtagacaccttgttttaagttcaatctattgttttttaattatgctcattaatgtttggttgagtaatatgtgataatattgtctgaattaatcatggtcattgtcttgttattgatgcaaacaatttaatattatatttctaaacattctaagtttgatttcgttaaccattacttcaaggcataatttaattagaaattaaaaatttaacatttaacatttaattagaaattaaaaaaatattaagaatgtaacattaaatgttacaaatagatttttggtgtcgtcattttgtagaaagcctatgatttattgacttttttaacaatcaatagatgataaaactattcttaattttagataatattaactttaatgcactgttgagagaattaacagccatagatgtttattaaaggcatttcagattaatatattatcaatcaattctcagaagattcaaaaagaaatatatatatatatatatatatatatatatatatataagtgaaaaatatgtaagatatgataggaatagaaaaactgaaaaagaatatgtatctaactgatagtacagtgaagcaagtagcattaatcaaactaatttgttagcagtcacagtatagcagagcggttgtgttgggcccaaaatctgtgttttctgtcttgatttggttttttcatttcatgggtcacccttcatgcagtcatgccaccatattcactttgacgttgaagaaatttaaaacgaaaaatttactagtaacccattttatcgtaatttttttaacacatctctaataaaaaaattattattacttctgtaagactgtaactattatccttaagttatatttcctctaatttcgtatataagtaaaaacaactactttcatattgattaaaaaagataattaaaattatttaattttattaatctcaaataaaaaataaaattatttttaaaatattctttattagaacttgatattaaaaataacatttttacttataatcagatttgcttatacttgagtctaaaataccaaataacatttttacttatataagtcgagagaaaatatttgatgatattaaaaatatgatcatatgatcactaatgcacctattagaaacttaagtgtgtttgagaaaaggttagcaatactaattgatccctttacatttttggggagcaatatatatacttgaaggaaacttggggcatgtggactcgctttgtcaataaaaaaaattcagcaaagactcgacacaccatccttaacctttcaaatgaacaacggaatgaaaactacctgactctcacacacaacacgaatccatggacttattaattgaaagtataaattggataccaaaatttgcaccctgtcctgttcccaccctcggaaaatgaatgtataacgtaaagacattaatactttgtttagtttagaaaataaaataaaaaaatgagaatggattttttgttttaaagttagatgatattttaattgtttaataagaaagaaaatgaaaataaagttttatatgtgttaagaaaaaaaagttgtatctaaagtgacataaataacctaaaaagagagagaaccatgacaaataaataaataaaatatcattttagtccttttataatataaagcttactttcgactcttttttttctctaatttgggcaaaacaaatttttggtggtctcaacaaaaaatttcttgtttctttgtctcctctcttttcaattcaaccaaagagagtgtaacttttgaatggaaacaaaaaaattgtaatttaaattaaaggtgttacgaagtagtttgagtccaattcgtaaatatttttttcatgggacagtatgaaattacaaatgttagtaatgggaaagtaatttatactcatgaatagtgaatcatttcttgttatgagtaaaatgaccttgccactgaatcacaataagatataactgtccatgtccatgagagattttggtccctatttcaggaattcaacctacctgatggctatctataccatcaatccaaatgtagcaaataaaatctaaattacactaaacttgttagtatattcttatatcataaatttgaatcctcatacgtgaataaaagtatttttaatatattcttatatcataaatttgtgtgtgtaaaatttacaaaaaataaacattttaaaatatataaattatattgtaattcaaatcatactaaataaatatatttaataaataagttatattttagatttatatgataaacaattatatgatgatacaagattacttttaacttctgataatttcttttaaaaattgaaatccaatttagaaataaagataataatataaattgaaagagaaaaatgattaagaaaagtcaattatatgtatattgatttaagatggtcaaaagagaatttcttttcacaagatattaagccaaccatctcaaaacactctctttttatatttatccatgttttattaatcatttatctcttttaatttattttctatctttattttaaattaaaatttataactttcaaaagaaattaaattataaataattcaaaataatcttatattacaatataaatgtttatcataaatacaaactataatttatatagtaaacaatatttatttactataaattctaattataatataatttatattttcaaaactaatcattttttaaagatttaattaaataaaaataaacatttatcccatataatatatggactaaaatactagtttaatctacaaaagagaaaagaaaaaaaaagtttgcattactttaacggttaatggtaccaaccagttggtaggatatcttcaaatctgcatttggatcagttagtaagatggaacttttgcatcaagtttagtgatgatatataccttatcagaaaagacgttgtatccatgagattaggcaatcttacctaaactaaaagcgtgcatagcggtcgttgctacaagtgtcttgactatttcctaatgatataacaataattcatgatgttatattaacttcccgtaaatcaacagttacatcaattcctagtataccagatatcatagacaggtgttgcatgctagtagtaccttcttcagctacacttctagtaagcttgaattgagaaacacgtgttgccaaattgttggcactctcatcaaatgctaaattctcttggaacataaagcaaattcccttcacttttctcttttgtctttttattttttttattttcatgcaattgaaaaacccctccttgaagaatgtcaattttctgtttccccataagcacctaacatacattgattgtattttaagcaacatggcctattaattcatatttatatgacccttttttctctttgcctttctgttttggcttccttaatctaattggtatagaatagtgttttagaaagagtgtctagcatcttgaataaatatgtgatccaagtccatgaataggccagattgttatggggtggttggattcactgtggggaagaggacgaaagtttattaaaaggaaagacagtgatgctggcgatgcaggtctttctgaatttcttagctgatttcattgtgactcagttttatttcatgcaactgagtggttttatatctaatttgcataatgtacatccaacttttgtttttacctatgttcatatattgttttttttctttttctgggattggcttgtgaacttttcatgttcaactcttgatgaatagatcccaactatcttaatcttacattaataattattttcccctgctcattctgtgtgaaatactattcatcgtttaagaatcattggatactccggccttggcggttgtaaattataagtttgttacgttactctctctctctctctctctctctttacattcataatctctgttgtttatgttatggttttactgatcctagaaactttctgagacccattttgattttgaattgaactgatacttctctgtttatttttctgcaactttcattgatgttctcagtagccaattaaaaaaaatgacacttgaaatgaatgtatgaatttgatctaatattcatcttgttttcattcttccttctttggcatctgcccttatgctccattcttctttttctgttaagtgttgaactataatgcacttcttttatttccacagctgattagaactcaatttatttgagtcttctttaggcaaaattctcatgagtatttgtaggagaaaaaataaaataaaagaaataaaacaagtttctccattaacttatatgtaaaaagtattagttttttcaaaagttgattttaactttatacacaagctaattttgtgccctggagtaatattggggacatattcaatgtttacaagtttcccttttgcaatgaaatgattataagatattactcattagtcattaccattgattccaatatccttgatcccaataccaatataaactagacttggtgtacgctccagctaatgattgaaactatatcaggtagagcactggaagaactcagagcttctctctacaatgagatccgaacctcagaaggagccaagcgccaacagcaaagatattgtggaccagtggtggcactgtccttcaattttatggttgctgttgggattatcatggcaaacaaattggtcagtacaatttgcttcttttctatcatgtattatataatgtgatgaactgaatgtcccaactagtcattacaagcctattgattgatcaagcacccttacatgtatatgttgttaacaggtgatgggtaaagttggcttcaactttccaattttcctcacatttgtacactacatcactgcatggcttctccttgccattttcaagacactctcagtgcttcctgtgtcccctccatctaaaacaactccattctcttctttatttgcacttggtgttgttatggcctttgcctctggccttgcaaacaccagcctcaagtataacaggtttattcacttgctttagcatctttatgaattatgataaaaagatttggaactttactttttgctgacaatccagctcttgcagtgttggtttctaccaaatggctaagattgctgttaccccaacgattgttcttgcggagttcattctttttggaaaaaccattgattttaaaaaggtgaggaattactcttcttcccttctttttcttttctactcttttataaagcatttcacatatcttaaaaaggactattccaaccccctttctttgtttttagtgcactaatcatgtatgtcattgcaataatgcaggttttggctttggctgtcgtgtcagcaggtgtagctgttgcaactgtaacagatttagggttcaacttatttggtgctctaattgcaattgcatggataatcccaagtgccataaataagattttatggtctactttacaacagcaaggcaactggacagctctggcgtaagtaatattaattagagtacatttggaagagtttatttgcaacttatttggacttatcttgcaacataaatatttgtattagcatttgacttagtttatgaaaataactttcaacttatataaaaactgtttagccttggtttctcttcgattttatacataagcatgatacaacatttattcaagaagtgcttaattaaactatttacttaaaaacttttgtgattgtagattgatgtggaagacaaccccgatcacagttttcttcctcggggcattgatgccgtggatagatccaccaggagtcctatccttcaagtgggatgtgaacaactcaactgcagttttggtatctgctctccttggttttctcttgcagtggtcaggggcattggcattggggtactgagattacattcctcttccaacaccattttttgacatataatgttgttttcttttaatgttagataacatcacactatgaatctatgattgcagggccacttctgctacaacccatgttgtcttaggacagtttaaaacatgtgtgattctgttgggagggtatctattatttgactcagatcctggggttgtgagcattggtggtgctgttgttgctctctctgggatgtcagtttacacatcattgaatttgcaagagcctcaggagccttcatcgaagccgaaatcaacaagtgaagacaccacatctacagattcaaatgtaaatactactaccactaccactaccactacctctagcacccttgtatgtgtcatatagtagatgatgaatcatgaatacaagaacaccccatttttcagacaccacgtccttggttttagcaattagcgaaactttatgtatagacagtactggaaattcgttgagattttttaagggtagcttgcttttcacaaagttccatcaatctctttaatttcttaaatgaaaaaagcattatcaactattcaactgaatgatgttcaagggctttggctttagcacacatcttatataagttcgtcgaccaccactgacacactctgagataatgacttattactcaacagatgacatgtctggttaagttagaaaaaagaaacgagcatggtcttgcaaatggaaagccacaaaaaacagaggagtttccacgataaatttagccgctattgtattcattatttagggaatgtaacaaatcgttaatttcgaaggtttaactcattttcacaaagtgaacaagcagtagaatcattacaccgtctataatgtttttgatggtagagcaactttgtttgaaaatgttacattgtaacctcaaatcttatactaacactttataagaaaggtaaatgtaatgattaaaaatgtaagaaatgtttgtataaatacacaaaagctcaagtgtatagctgtaattttattttgatattaatattaatatcataaaattattatgtggagattttttaatactttttaaaattttgtatattaattttaaaatattaatattttgtttaataatgacatccatatatcaaatgataaattactatagaattttgtaataaaaataaactttgaatgactaaattattaaaataaagtatatacataatataagtaataatgttagtaacttagtattattataattcaaattaatattaacagttcaaatcaatattattttttccttgattaattattcagttaacatatttttattttatttttaattcatttaaataatacttaacaaaattatgtataatattaagcataaacatatttcaaaataacattaaaaattgccattaatagaaaagtgttatctacataacacaagtcaggttggtaattgtattcaaactctttttttcttttgaaacacaaagccgttacatttatgaaataacagtgtcgtaaatacaagtattaaattaaaagtctgagatttagcataaaattacaccaaataagttatgtaataaaacatctgagatttagcataaaattacaccaaataagtatgtaataaaaattctgagagctagcgtaaaattacacaactgcctaataagtgagcaacgtaattaacttgcatccttgcacaccaccctccatggtactcaaactctctttagaaatagtttgacttaattaaacatttcatgtctctagtttctcgatttcgcaaatttcatttccaaattttctacatgaatatgattcttcactgttttaatttaacatctaataaccaaccgaaaatataatgtcgcattatttagatatatcatatttaacatctaacactcgtgaaaaaaaaattggaagatgaagttttctagattaaatatatgaatttttttggagttactaaacatatatgatttggtaagagttcatctattaacatctaaatatttaacaaaaaatactaatgtaacattgtcacatcaacaaatccacatatatcttaatatcacatcaatattatcattaaatactcaagttaattaatagatcaaaattacataattaaaatattaaatcaaatttgcaaaaaaaataaaaatgcaattcataaaattgagaaaataaagaaaccaaaagtacaataaacctaataattttaacttataccaaacacattagactataatttatcattgtccacgctcacgtaatcatgggatcaagtatgcaaattaacatttttttttttgccttttctaaatgagggataatggataacaagttaatacaggcaccaaattgcacaatttaaaaataagactaaaatcgaataattaaaaattaagacccacatcaaacttatgccagaattccaactccacatctatgaatgttaacaaatgaaccaaaatttacaaataaaatatgaaaaaccaaaatcacctaaaaaactatacaagaaccgaaaatacaattaagcccaaattattaagggtataaataaataacattgaagggaacagaagcatataattctatgattcccgataatttttaatgcatatgaactattaaggtttcaagaaagctgtcacacgagacctgtagcaaacagtaatttctcaataattggatgtgttgaaagaaaaactagaatcatgctggatagaaaatgaatttaaaaatttcaaaacaaaagaatcagacaaaataaatccataagcatgttggttcctccatgcaaaatcaggtaaggcttgtgaagggcttatacatgactagaaatgtgctaaagaaaagcagatatcacaattttcatgctccaaataaaattgtataattcaatgttctctgatatcaaaatgtaatatacaggtgagaatttagaacggaaaaattggtatatctcacctaccaattcttggcttagtacattatcagttatcactaggaattaccaagtttcttatatagcaacaactaaatgttctctcgggtaaaagagggagggataaataaactttaggctcaaaaatttaataaaaaaaatagaaaaagaaagcctgcaattagcacccttcaaaatcgttagcaccaaatatccccaccaaaaacatttactaattttcctttctcattctttggccacatttttatttacacttcagatcaggccagtgttcatacttcctgcatctgagcacaccatgtgtgcatatgaacattatcgcaccaagaaaattttttccagcctaaaaattagagttccaattgatttgtgtaggctgaggctgctgataagatcctgaagggggacctacagtttcaacgggcccagccacagcctgagactgttgcaaaagggttgaaggtgaagctattgtctgccctgcttgatagataccagcaaatgccccatgagcagcctgtgttggggggaaggtgagatgttgtccctgagggctaaggttatacagagaattaacttgccaactggacatgtcttggcctggagcaggtatccacactgcagagccttcactctagcaaaaaaaaaaaaaaaaaaataatatgcttaggaactccagaaagtccaagaatttcatttcatgctgatgaagcaaacataaactcttaacaaaataagattgatactattgaaaaccagggaccaaaatatggaacaaaatttcctattttatcaataaatatgcatgggtgaaataaaggacattaaaaggaagtaaaccaaccagctgtcctgttgtatagatctggttttcctttaactgagacactaccagatcatcatttccagtggagcttccagtattaactgtttgacctggcgcatatcctacaggtggagtgataaatgatccagaaggaattcccatatgagctgtgtttcctgtgtttgctccagccttgaattgagggagagggaatttgatcccagcagctgctggtagatacatgctgccagcggatggttgttgagggaaaccattgtggtttaaaaattggtgtattggagacacataaattggagggtaatagtggccatatgggaagaaattagcagggtatggtggcctgaaaatagaaaccgactgtggagtcacaggtatagaattctgcaggggtggagttgggctaggggacacagcctgagaacttgcattctgcaatacaaagtaaaaataataaaaaaatagaatcatataaaaggaaaaaatatacagtcataataaataatatatgcacttgcaaagaattttacattgtcatccaattacaaaccgctatgtatggtaaatttattgacatttacaataactaccttaaaagtcatactaagaataatttactttttacagatgttaaacctttttaactttttaaaagtttatgaatggaaacctttttacttgaatgagtaaattaactttggaaaacaaatgttaaccttttactttttacaagttcatgaatggaaagaaatttaaaaaacaaagggccaatatcaaaacaccaaaccggaaaagagagcattcaaacacagggagattcggttttaataaatattaagcagaggaagatcttaggaagtaaaagatggagaaacttacaacaaagttaggaaggcgagatgtatcttgtgactgaggttcagttccctcaaattgaacttgctgagtgcctaacatggaggaaatgaaattcaaaccatagttttgagcagtttgaacagtcggaatttgttggccttcaggagccaacaaaacctcctttgactgatcaacctttgtgtcagtaccagttataggattgccatttgtagctggtgtcttttcaatcaaataagatgaagaatgtggataatcaagatgatctccttgtgcagtcaacgatgcactttgattgctatatccagacaagaaataccatcaaaacaaaaattacatgagcacaccatgacacaagtaataactttggtaacaaagaaaaatcaattaattcagccagaataattcataaaagaaataataactcagccttatgattgacaaagagcacggaaaatggcatagtattatctccaaagagaaccttcccactttcctagtactatctttctggcagattatagttgttttgttaagaagtttgatataagagaacaaagctaggaaattacaaccattaaaaagggcatgagggaacacacgttcacacacacacacacacagtcacagagagaggggtctgttatttgatatgcaaggcaaaagcacatatggagcagatgaattacaaaccttgaagttgcagcttcttcactcaattcaagggcaggagaagcattattgtcaccacctgttccactgttggacttttcacttgggcccaaagtatcaaagcttccaaacgtcagaccactttttaaagccttgggtacttggaaatggtttggaaaagtaacatgttgcctcaactctgctgaagattgcacacaagcttctgaagttgaaacctctgtggtattagctgtttcataaacatgtatgaacacgccaaaaggcattataagggatataattagagatatattgaaaagaattgagagaaaaattgtaagtaaataaataataggcaactctagattgtcaggatgattccttcaagcatggaagagtatcaaagcaagtaaatttgagggttagcacacaaaagcaaaacccatacaagtggcatgcttatttaaattatgggcttagtcatgctgcttctcacttaaaataccttcagaaatagtttctaaggttcttctcctgacctatgtcctcctattcctgtgggcttttcttcactatctcttctgaaaatttacattgtcctcctttctagtagggagagcaatgatagtatccatatggtagaattgtttgattggaaaattcaaggaatacttcaacccagtacattgagggaaataggacataaagcaaccctgttactcataagattaaacagatataaacaaaactttacctagaggtgattggctaccagaactggaagatggcctcaatgaatcatttggggatggagatgaaagttgtgagggttcagataaatgcttattttcaacttcatttaacttctgtggggcatttgttttgcttgttgaattcatggacccatatttttcattcttggatgccgataaatcattaacttcatgaacaactttacttcctttaacatgatttggtccggcagatattcggttgctcccaacttccctactaatagcagcactgacaccaagactccgggagacagatgatgctactacaggatccaaagaagaatgaacatcggatacagaagtttgaagttgatcagaacttgacacagactttccttggtcagtgctggtaactgagccaaaggtttgagtagaggaggaggatgctgcaacaacagctgcatgaggttggacattttcttgatggccagtgtccttagcagctgaagtacttttaggaacactaactatgggagattggccagcagaatcatggcctgacttcccattggattgatttgcagcaccatgttgagctgaaactctgcaatttaagaaaaatgattttgaagaggatacatatatctaactataaaaaagaataagtaatcaagccaatagtgacactggtgtatttctcatcacaccaacaaacaactttatataaatgtatttagcaatccaagtgtacaatcataagatataagatgttatcaagttgatcatgcaagccaaacttcaagcaagttgattatcaataaataatcaaaaattaagtatcctcttacttattctattcattgtaattattattagatattgaagttatgaaataaaaaaagagtacaatttgatgtttaatcaacataaaattttaagcatgacttgtgagatttggttagaattttaggcacaaaacaggaaaataagagtgatgtcatctttcacctttctttcacttcttttggagtcttgcttttcttttttattaaatacataaggaataaataagccatttctttccaccatacattttctcataatcaaaattaatctggtgaaataaacaaattaaagcaaatataaaacgaaattgctaccttgtagcttgagatattgtattagtcttagttttctgtgaaaatgtctgagtagagggagcatgacttctctctgcaatgtgattgactccattttcccttcgattagcttggttcctcccaccaccaccatctaacaacagacatcaagacagggtaacaacttacaagtcaataaactagtagaaaatttgatgatgcttaggacaggtctctgcactaaagcagttcatcttataaaaataatcaattaaaaaaaaaaaaaactaaaacaacatcaaaggattaatagtggcaacggaaaggtactttatcatgacatgctggattcaaaaggaatgtaatagggctcattaagcagcaaaataaaagcataattcttaatattcagataaaataactcagtaagaaggtgatgggaggaaaggatcacaaagtgataatatctttaaaaaaaatatggcattccaaaagtatttttctttcaagagacagggaaatgatggtttccaggtaaccatttgtggaaacgaaactccataaatggaagagacaagtaagttaataacaaagcccaaagtcaaacctctaaaaggtggggaaattgtaccaggaaagttagaagaatatcctccagaaccaccacttccccccctcccttgtccgccttgctttaacctaggctcatcagaagctctgctgctcaatccctgcaacaataaaaataacacaaaatactcaggctaataaaaaaatattaaggagaaaaagatgggacaatgcaagcacatttacttataactggacatatacaattacagaacacacagaaaaaaagtaaaaaacatatacaggcaattataaaacaagacccaagtcttttactctcagcaaataatatcacatgatcccacacttcatcataggcaggaagtagaaacctataacaacctcaactgttcaaacattcataaaaagaaaggattcttatagaatctcaacatggagtctgccaatcacagtgctcataagatgatacaatggcaactaatgacacaatgaaagcttgcctagcagctcacaacaatcaaaataataaatacacttcaatatagtggataaacaggtaaaagattcatccactacaattgatcccctcaatggcagaagaagcaccaaattaatccgattcagcaactcaactttcaagagcaagtaaggagggacgggagaatcttacccccttctttcggtcacgtctccttctcacctcatgaaaagtatctgtgaacaaaaaaaaaaaaacactcgacattaaaaagagagagagagagagagagaatctcaaatatgccataacacatttcttttcaagaaatcctaaatgattatatagtgttgaagccattagttaagaaacacgtgtgagcgagagagcctgagagataagataccatcaaacaccaacaatatcattagattattattatattcaactactatagctaattcctcgtcacataaacaaaaccctacaaaggtactagcttttatctccctgaagcgcactgatacacaatctccttgttgttcccaaacattgaacaaagtttcaatgtccaaagagccgcacacacagacgcagctcccctcacctcagcttcttacaataaatattttaaaaaataaaacatgaaaagatgaagtgaagtttgagcaacaaccctaacaaacagagacagtgaaagtgaagcttaaaaagtgggggaagtaggggagagggagagagagggagggagaagaaacggatcgcaaagaagataagagacctaaatagagaagcttctgagcggtctcattgggatccatggaacattcacggaggacggcgtagatttcgtcgtcggtgtgctgcttgccggtgatctcacggatgtcctggatgattttgcgtacattgtttgggatcggaaccctagaattcgaagacccaccaccgccgctcatctttctgtaacacaccaacgaagaaacaaagaacacactgtctctgttccccaaacttatatatttttactaatacaaccaaaacacaacacagtcactttgaatcattaatatactccatttccattactatgcctattttttattttaaatttaaataataactgcttcaaaatctcatctattctatatttgtttaggcttaaagaactgtaggtcctataaaatactttctccatcatattataattattttatcttttcaatataagattcattatttattcatttatatgatattaatgatatgagtcagaaaaatgaaaaataaattaatgatgataacattgattttataaaattaatatttttttattaatttttcttaattaaaaaaacaaaaacaataattataagaacatctttagtgttagatcttgaacaaagatcttaagcttaagatctgatcttcattagatctcccaaataaagaaagtggagagatctccaacatcaactgcacattgttcaaaaaaaaaattctctctcattttctctccctaaaatctcaaattaaaatttaccattatctcaattttagatctaccactaaaaatgacaaatagcataattcatcgtatcaatcaataaaagtgattaaatttgttgattttaattaataatattataaattttaattttattccaaaattactcataacataaacttataagtgattgttattttttaaaggataaatattcaaactaattaatataccttattttcttaatagtataataaatatattcactttcatgagaattgagtatatatcactgaatctcacaaaagattaaggataaaaaaaataacaatcaatacactttttagatcgacattaattaatgaaataatagtatgtttcttataattaaaaaaatgttattttttatttcttatataaaaaatatattaataataaataaagattaaagtcttcatatttaatttaagtgtcatatttaatataatttttaatcaattggctaaaaaattgtattaacagaatattaaaattagattcatatgtatatgaagagattaagttatacttataaaaatacattaattgttataccatttaataatttaaaattgtacaatcattttccaaaattcactaaaaattcatttcacattaatcatatttaggaaaaaaattattaatactaaattattgtataactcatttatgtacatcaatatttatttatatgtttaaaatatataaaatataaattatttgattatctttttattattgttcaatttgaataaaatttataaaaaaaaataaattttgagtctcgtatgaacttgaattattaaacataatttaaatataattcccttaattatacgataaagagtattatcattctccttaacgatgtatttgtatttttcttttgggatagttccgttgacctagtgacaacaatatctcaatcatcaggatggcttttgaggtcaggctaaccaacatggcttcttgaaacgccatgcaacaatactagaactaaaaaatcaacttgtcaaatatcagaattagagaaaaatatatgagaatcataaatttttacattattaaggtgtgaaagagaaaagttcttaaatcataaaaattatttttttatgaccaatttcttatgaaaaaatatatttgttcactttagattatagagattctatttagggaaagatcctaaactggatcatgatggtaattttggtgcgaagcatgatgacgagaatgagatcatacgagacattggatacttgtatagactcttattttaagttaatatggacttaagatggagtgttgtcttagttatcataccaatgtttgctaatttatataatgtttatggtcgaaaaatcaattatccaattgtcattacacacaggatgtgtgccctaaagaggagtgtcacacgttcaatatgaatatcttcttagtttagttgataaacttgtttctctaggaggggttatgatgtccttgaaagagattgatataggtaagaacgaacactcgattattatgatgagttatgcaaatatcacaattcgcatggtatcaaggtcccacttccatatcagttacccttaagtcggtggcttctttgtagaaactgttggcttttatgcatttaaagtgatataacccatttgtataaattggattcacacgttattattgagtataactcaagttcccataatattgagattcctctttcagaataatattaatcctgaatgaccaaaattttaatgaatttattcaatccttatttaagaaaatgaggggaataatttccaatacttttaataataatttctcttgtattcgattaaaacagtttcgtataataatattgaccaaaaaataattatgtttttgttattattgtgagacaaagaaaaaggacacatatgacgtataatataatattatcataaattaagcagggttattaactttaacgtaaaatttaaaatttagcctattaaataatttaaaaataataaacaaaattggcgaaaataattgttgagctatgaagtaattggactcaattgctaaagcccaaaaactactgactgtcaaactgtagttactgagtgacaagttagaattgtgggaattgacaaagtgcgaagtacacaacagttgatagtagctgattgtggctttttgacaaagaaggggtgaaaaaattaattatcatttggaagaattttttttataaatattatcgaatggaagtaaattgtataagatgttgcgacattaaatttttttataacagactttaaatttttttattataatcataaatatatttacaatttaagtcgtaaatatatttattatttctattttttattattattataagtcttaaatatatttacggtggagtttgatgtaaacgaattctgaatcagaaatttaagacttacccattcgataatatatttaaaagatgcccaaatgctaattattttttttttaatcctttttgtcaaaaagcaactgattgcatctgcatctgtttgtgttcgacagaacagaatagaacaggaacctcaaacctttgtgtcgagaatcttagccatgggtagcaacggtttgaggtacgaaatcgcacaaaactcttacatcaaactcatccttcactcactcaaaaatccaacctgcgccgtcaacggcgtcttgatcggtcgcatctccgcttccaacgacgtcgtcgagatcgccgatgccgtacctctcttccactctcacatccctcttcttccccagttggagatatctctcatcatggttctccctctctctcttctctagggatttatcattttttttttccattcaattcttaccccatattgtaatttacaaaattatgcacaaagacgtatactttcttaatcaacatgcaacctaatcaactgggtttatctttttttcttctgggcatctattgattttttgtttgctttgtgttgcctgtagttttctgatttttttttaaatcaattttttgtgtgagatagatagaggaatatttttctgctaaagggttgaacatagtgggctattttcacgcgaatgagagatctgatgacagtgagcttggtggtgtggcgaagaatattggtgaccacatatgccgctactttccccaagccgccgttttattggtttgttgttgattttttttttttttttttttgctaattttgtttttaattatctccttttgtttatcgtctttctgtttttattcaattattcgcagttagataacaagaagcttgatgctttgaaaaagagcaaggaccgtagtgccataatgcaggttagcaatttcagtactggataccgctttcatcaagatcaataatcattgtgtttatccactccatgaattgtatttgggcttctttagatgatacatttgatcaaaccatcaaatgtatagaatagaaaccattctgatctatatgaatatagaaatcctcaagggcttttgtcagtggactaaaataaccccttatttttaatgggatcatgaaaacctgtgaactcgttagaatatgtatattttctgcagtttgctgcttttgcattggacagttaggagtttgcttatgttggttggtctgactgtcttgtttttgtggcttattttggtgcatcattctctaaatttagacaaaactgctgtatctaaaaacttaactagaaatagggggctaggatttagatatgtgggtttcattggttgtaacttggatcatcttggatggctagaattcaaatttcaggcttaatgtcatgcttcaatttctcttgttttcatcatagctcataagtcagaagagaggaatattctgatagggactcagatattatgaggtacctaaatcccacctcaagtagtatgagatattcggtgaagtactcaagtggcttggttctctccccccgccaaccttttaacagctagcttttaaggcagggtttcccaagtgcttgggtgcttatcatattcctgtttgatttgccacatactgcagcatatttgggagccactcttttgggggagataatatttttgtcttttttccaaaagttctgtcaggaaagttagcaaacaaacaaacaaaaaaaaacttctctaaaataagctaaaccaaatatgtactaagatctatcctattccaagagtgggagaatgaaataataatgttgtctaacgtgcacactttgcatgattatacaggctacaacctcaaagctataaggcttcatccaaaattcgtactaattataaagattccttgtcttttgtttcttagtgttacaaatcttatggttctttcaaaaacactttttttttttgttataaaagaagaaattcattatctgcttgttatataagtatggttccaacttcctagagtttatgctatatataatatacggttcccccatatataaagtcatttttttgttagttacattaaccaagattgcctttttcttatggtttagctttatgttagggatacatctaagaactggaagttggttcagtcagatgggaacaatcgattctctctcaaagagccatcagcaaatctagtcttgttggactatattgcatccgagaagtggaatgacattgtagattttgatgaccatctcgatgacataagcaagtaagtgctttttgcttgcagtatttctttctttccatagtattttatttatctgtgcagctataactgactaagactttacataatacatattctattgttttcagggattggctaaacccagggctttttaactgatcccggcccttttgagtccatttttgcgctatttactttgcaagtggaggatattgaggcttattatggtgtatgctggattctcaatgatggacatttagggactatattttgaccctaggaaagttgcttcatgaaactttttcagttgtataagcaggatatttaccacccgttcgtaaaggattttgattgcagagcctctctctcttttattccccccttggatgtaggtatatttaagtggatttttttttactctttttttgtttgctttgtttgtgagttgtgacgaactttgttacttggtagaaacaacaaaaccatcactgccattatcttagttaatccaatggttttcttatgtttttatggttgcaacgcattctcttttcagatttatgtttttattcaaaagataaaataaaattgggctgtacatgacaaagggagtgggggacagttataaatgattacgcgggcccaaatcattgtctgaggtgattatgattaatcttctgaaaaaatgttccttttctgatcaatatgaagcgtacaagtttgagcaggattggtaagcgtgtgatatgcaagtagtagcactaggcaacaatgccaatgatggtgaggatgtttttatcaaatcggtttcccactatttcagatgtctgtggccaccgtgagtttgttgtgtttgaacatatttaattggatagaaatagaatacaacaatgatcgaagtcaaacaaatacttaatgcaaacaatttgcttgccctgctaacgtaaaacaatcagtacaagcttgttcaactttctgtttatacaatacaactcgcttaattttttttttgtcttgtacgagtatttaatttatattttataatttataagaataattattttatattatttgaattttaatatattattaactattaagtttaaattttataaatatatgttaatagatatgtcaatagataatttataagaagatatttttcttagtcaattttgttcctaaattgaacaagaaattatcagctaatattcttctcttctattgctcatgtacacaacctcaagtcctcaactgttttgcgctgatcatggcttaacattcagtacaaattcttctgccaacgactttcaagttttcaattctcaaataaaaaacccatcagtttctgaagactctcttataactgctactacgcacgataatacgtttcattctttgagtggaactgttctcttctctcactcacaccctcttcttcctttctttctgtaaaactcccttttccttaatttcttgctgatagtacaaaaaatgtttacaacaaaataccatatgatagcagacatctttgatcgaaacaacacaccataatagaactattatatgatcatgtatcatcctctattatatgcttggaagctatgttggtgatatgtcatgatagaggtgaggacttgaaaaaaactatgataaagagtacaacaaattttatgtttactaatttaagttttctatttttcttttttgttcgtatgcaatgttcattatttctctcttatttgttttccttctctctcttatttctatatatttaagatggccgtatttgactatctcaagttaaaacattatagtaactaatatatcttaacttgcaccaaaatacaccgtgttcctattatacattctattacttcaaattttattttctcatctaaattagttattttttaaaaataaaaaattgttatcgctttgtttataattcagtaatttttttaaaaataaaaaatgctatcttttgtttttaatttagttatttttgaaaaaaataaaacctgagcagtttttctttttctttttcttttttacaacaacccgagcacttcctataattatttgacttaaattaaaattcaaaacaaagaaaactcgacagtttaaaaaaaccccgaaaagagtgtaatgaagactgagaattttattttaaaaagttaatacaagagagtaatgagttgaaatttcaaaattaaaaaaattggcaatttttaaataacagtattttggaattttaaaaataaaataaaatagtcagttttcaaatattaatggtttattttatgaacaagaatagagtaacaagctaattttggaattttaaaattaaaaaataataattagttatgtcttcattcttaaaaatttagaaaacaaaactatttcattaatatcccatcgagcaattaaaaaatatgaaacaatttaacataaaatagatattaactaatattgttgtgaataaattttcaaaaaagaaatcaagaaatttatttattagattcaatttggttcctttatttttttaaatatatttaatttggccatttatttttaaaaaaattaattaagttttttatttttataaaactgatttaatttagtggtattttaaaaaaactgactgcatttgtttaaaatgtttgaagttaacaaaatgaaattagagcaaattaaattgatacataactagagttataattaaaccttttaaaaaaagattaaattataattacattagatgaatgaatggatgatggaggttagagaatacaggtcagagaagaggacatccatgagcaattacgcctggagctgtggggcatttggccaaaggacagtggtcatcagcatcttgaccccaccatattggaccaaaaacaccataattttgaagggcaaaatacagaatgacacccatgaaagcaacgccagcatctaaagcagctgagaggatgtaagtatatctagcccaccatgccttgaacttactgtaaacgtagaaattgaagaagattccaacaaatccccaagttatgtagttgacggatctggctggtgggatgccaccaccaccagcaatgattaagggcatattgatgagctcaatccacttgtggtttgggaatttgtgagcaagcagccacactggaacaggagcaagtaggccaatgaggaaaaaccaattcatcccagggtaaatcccatccttggtaaacattctctgtggtcccactactccccaaattattgaagcattgtaaaacacttcgtcaccagggcatgtccatggactaccagctggcaagtttgtttcatcacatatgtgtggaatacttgtcagaagccaccatgctgttccaaagtacacacctgaagcaactatggtacctaccaactgaacacaaaattaactatttatttgtttgtctgatcacttttgttaaggagaaaggaaacatgacaaagattgcgagttcaatgtctttggctaataaaagtaacattctaataaaactaacatttactgatttaaaaaaaaaaaaagttgtttagatcaaccatatatgcatgcatttacatcctatcatatcctatacctacctgcacaacgaacatagattttggaggaattttcatatagtggcctaatttgaagtcttgaaggaacccgagtgcttgtgacatgctgatgtacccataagtcttgaaggctacattagcaagtggccttcctgggtaaatgtacccaattattaactctgtaatcacgttgagtccgacttgctgcaaaacaagaaaaatacaaccttttgaaagccatacaaaacaaacaaggcattgttgcattttgcatgcaaaacacttttgtctacttggacaatattggacgttaccgtgtttgttgttgcctgaatgaccccaattggcaaagtgaaaactaacgcaattaccagagacattaggactccccaccatggcaattggagttgcttgccaaagccttcacaagttatcaaagatacaacgatcattagaagcaaaatgctaacaaaccaccattcaggtacttgttcatagtttctcttcataattctcgtgtgcacatctccaagttgttgtccttttagtgcagaagttgtcttcttccacatctgataaatcgttctttcaaatagatagccacaagcataaagttagatggtttattataaaaaaaaaaaaaatgggaatgtaaatttagatacactggtgaatgatattgttctgcaatcaaagttgaccaagttgtattttatcttaagaatcactgccaacctttgaattggagaatagtatcatgagtaccaatagataatacaattttataggtgttttagatattatttttcaatcagaattataatttcacctctacaattcatgttgacatttaatgaaatcttttattgcatggattatcgaggtgaaactctaaatccagttagaaaaacaacacaactatggaatatcatctaagttttatccatggtactatatttaaattatatcactaactaaacaaagcttactttccatggaagagggcaacatgggcaatagtagcagtcagagttgcaaagctcaatccatagtcgaatgcaaatgtgatactgagatagagcttgctgtaattgttataattgtccatatcaatgtcaaaagttttagcattcaaaacccgagtgacattatatgttgcgccagaggaatcaaatgtgtgagaactgatgatggggaacttcttggcatcatataggttgttccaataggaaatgggaaccagaacatacataaacagcacaaatccaaccagaatattgatgatggcaaagccaggaacagccaaaggactccccaagaagccagccaccgtgttccagtccaagccaaatgaaccaatgccaaggcctttcatgcccgaaccaatttgttgtgcagtgatggagtttttccaaaccaagcaaacaaaggagattgttgttattgcttggaaaaagtagcctggaataacgtaatatgcaaagcttgctacaaagaccaggaaaaagaattgcagccttgtgtttcctcctttaggccttttctccttttcatgaaatgccctgtcattatcacaggcagaatattccaaaattaaaagtttcatataattaatccttttcattcacatatccaaaaaaataaagacgccaaaaatcaccaaacaagaaagaatagttaaatttaaatacctaaatagagacacttgtacaaggtttgaaggccaccacatgtacggggaatctacaagacatttcctgaaaatcccagcccatccataaccaagcatctaaaaattcaacgacaaggtttagcagactaaccatattttgaaaaatgcttgttattttgattaatagccttaaaagtaaaaacaaaaacgagtttttatattcgtatatttcattttggaaaatgctctttagtgcgaaaaatatttcgtgaaaaagttaagaagagacttcaaataaatataatttaaaaaatcttttcacaacaaccccgccttgtatgattatgaatccctacttttcgtaatctaatttttaaggtgtttttcatactaaatagcattgttgtttcattttcacttttttttttctttcttctatttctctcaccatctcccgtcacatcatttatgagtttctcacttctctttttcacatcattgatgtttactatataataatgaaatggtaatgacctgggtggaaagtgctaagagaaaagcggcaagtggatggatgttcctgtggtagaaagccttaacaatagtgacaatgttgatggcataaacaccactagatccagcgctggcaaagatggtgatgagtgcatgttccttcagattgaaggggccagggttcaaggagaaagaccacttggtcaacggaacacgaattggtttggtgggaagtgttgctgccatgagtttcccaactgggagagagagaatctgtgctgagacggaggagatgtagagagggttggttctgtagccgaagaattggttcacaaaggagaggataatgcatgaggccaaccccagagtccatgttctgaatgtcagtgctggttgtgttgggtcgtcggttgttggaacggtgagcctcacttgctcaataggagactcatctacctcatcactttcatctgcaacaacaataccaacatataagattgattaaataactaattaagaaagaaaaaagaaaggaaaaagattccaaattcgatctttttttttgttaaaaaaattacgacaacaacacatacaatacaatacaatacaatacaaacttcaccgtatagctatgttgaagaagaaaaacacacgcgtacacactaaaaagcataaaaagggcaccggcatacacaaacaacaccacaaatacaaattcaacgtggctctacactcttgtctatgatcaagagagagaatatgttaataaatattcaccaacttcgataaaattacaagttttctggatgaacttgaaaaattctttattgcagatttaatttcatgaacaaactttaaaaaaaaaaaaaaaaaaaaaaaaactctacattaaaccactccctttcacttggttggtgatccctcttcaacaacaacaataacacaaaaaaaccaacgagacagaattatttgttggtaccagacaatttcacgcaagcggcaaagaattatcatggacgataatgttttttgggaacatgtaatgcattttttattcaaggttcaataatttcataccaattaattcattctcatacgcccgatagtaaaaccaaataacatgttacagcatgataatcaaaataaactataatgaatgttaactcatgagtatataagacagacaagacaaggaaggaaatatgttagcaaaaatgaaggggtgttgtgttgggttatttggtgttgtaatagtaccaggtatgccaagttttgagtcgtgctgattgtcgacgaccccagccattgcaccgggatctggttcttgaaccctctctctctctttcctcgttcaggcacgcgaagacctcacgttgttggtatcattttatagggacgtgtgcactaccgagcatgccgttacagaaaacgtacatgtgtgcctggaccatttagtggtgttaatttattcatatttgacgtaagcatgatcaaatcaacaatgtatattactaaatatcacacgagataaataaggcggattttaatgttctatccttttattttagcaaatcttgtttatgactctaagagttgaccaccaaaattgattctatatgctctaaggagtaaatagaatttgactctgttctctgatctgtcttattttttttagcccttctcttatgaatgagttggcatagtagcagtttgaaataattattttctttgaaaaaatacacatgcatatttattttattagggactcatatgcacaattgatatttgatatattagtcttcaataagattaactagtacgtaattaatgaccgtgtgtattgttcagattattattgttaatttacaaaagactgttcttttcaatgaaaaatcaatttaaacctaattaatatatcaatataataaatatgtattgaaaatattctcctttcctttttattgtaattttaaatattttaaatgcggttgttttttttattcttaatgattttgttaattttgttaattttgtttgttttaagagaaaaatgtatttaataacccagaatctaaattaattattgtttgtcgtgtgggttaacgggcacaattatcaatcatgttttatactatatatatatatatatagagagagagagagagagagagagattgatgattgatatcatactagaaaatgagaatatttaactagatgtatggaaaatataaagaagggtttcataatttaatagtttttttttacataccaatactttttgatttcttattttttctccatacaaaaagcaatcttaatcttagtactaccatgcaggattcagaatttgatatctcaacagtttgtttaatttttaatgtctgtttaaagtacatctaatgaaaattaagcactacgtgcattttcataaaattaatccgaattcttttaaagatttgtaaaacggctgccaaacttgtagttttttaatattaactttcaaattttgaatgaaacttactaatctccgtaaatgtacagtgtacctgtccgaatgtaattttttaagtgaactatcagtaggccgagggggtacatatataaaatacataagcttaaattaagtttttatattaccaataaaatgagtatgtgtgagctgaatatcttatggagaaacagcagaaacaataaaatgaaaaatgacatacattacatgatgctacagtttgatttcattggtaatatgacgaagtcgatcccaaagctgagtcctctacccgctgaccttccttgccatctagctttctggaatttgtgattctctttgatgtttgttaagcgattccaaagctgttggacaagaaagaaagtggacttattcaacaatgtataatgaatggaattacaatctggtaatgaaagttagaaaagaagtacccacttggctgcattatcagatttccattcaacaccattggggtccatgccaatattaatggcagtgaactttaagatgatgcagggttcagagataagactgtctaaggaatttccattttagtgaggggagaagctatgtaccttctttcgctcgcgatgtgcataggtctctaactggttgaagtgcataggcctctaagtggttctcaaccgtcatggacaaaattacaaaaaaaaaagaagttaaaatatgtacgtgatttgttaataaatatgtgaattttaaatttattttttaataatgtttattttatttttattctttgataaaataaaacatttatttttaattttttacattttttagttcataatatattattaaattttgtgtttatttttttataatcttttttattatcggtttctctttggaaaaaaaactaataataaaaataaaaatatcaagaaataaatacaaatttactatttatcattaattaaaaaaatgtaagaaacataaataaaattattgttttatcatagacttaatgttaaaaaagtattaaaaataaatataaaatttaaatatttattagagattaaaaacttattttgaaaaaaaaaatcaataacttgaggtttttagacacctatataataaaacgaaaaaacaatgtataggtgtgtaaggatcaaattcttaatttaatcttaaatgtaaatttgacaatttaagagcgttgtttaatatttaaagtacatctaataatgattcttaataacattcataaatgatgctgacaaaaaagaatcatatatgatgagactttttttgtttttggtaaatataaattatgagacgtttttgtttatcacaataacgtattgcaaacagctggtcaaaataaatttcattttaggaattatacttttatttaatgaacaaaaacttcacgtgccaaaatgtggtataaattaaacctgcgaaaaatgtatagttgaaggaagttcacatagactttcttttacactcaacaagttcagaaaactgacatagcacgtgaatattaatacacgtgattattgatacattatcaaatgtaacgtctacagtctactaatgagaaatcgttcaatgtacgttacacccacatggattagttaggtcattacactaaaatataaatataatcatttgcccattaaattaactcaactgtctcgacgataatttttaggttaaattaattttttttactttaatctttagaacatgctatttgttggtaaggttttaaaacactcaagtttcaggtataactttagtgctttttgacttgagtccaagaacattatatgtcttgacaacaatggtcataactatctttagaacatgctatttgttggtaaggttttaaaacactcaagttgctctactgatcttcgaaccatgatggtcttccgaaatctccaaggtctcttttcagcatcttttttggtagaggtttgcgaggttttttacttattgtttctgtacaacaaattgatgagaagcttatactcttaaagaattaagatcacattaagacatgtttattttaccatttgtattcttattttcagcttgaaaatattcatgaagatgttgactgtggaagtggctggaatatgatttttgtatggtgataggtggttcggggggagctggtaaaaaataatgataagagaaaagacttatttttacagtgtgaaacttctttttttggatggcaggggtgtgaagatcttttgtgagggtggcatttaggcgaatatgtggcaggtcgtgtgtggtgtggctgttggttgagagcagtatgttatttcttctatactgcattaaatataatcagatctcaaaatgcattgtatatttctttttggtctgtcacagctgggaatttttatgtcttaattgagaccttttcttttattcaggtttttgattatttatgctcaagctagtgttatgaaaatcggaccagattaatttatgggatcgttcatgcatgtagctcgatttgagtcaatagtaggattgttcatgcatgtaacctgatttcacacgccttgaactgtcgattttgtaaaaaattggtgacccgatcaggtattacgacctagaaaggattaagtgtagttttttttttttttggaatcgtaaaatgttatctgaatatgacttgcgatcttgtatgtatttgagttgtgttatctaaatcgattttgaaaatcctccccatgttgttgcaagaccgtttctcttcaatctttcacccttttatttgcaaaaatgagatgtcgaagccgctatgaaaccgccaatttgtgttgtcgacgagaatatctttgttgttgcgtagccttattttactctacatttgcactttgatttctctagtgggtaacaatgctaagttactgtgtaatactgtaataggatagagtctagggtgccacacccaaactccttgtgcacagtgccaaagccttttcaaattcccatttcttctacttttccaaatttatccctcttcttcttttcccatcttcttcaaatctagagtgccccctttcatatgatctccatctctccacacaaattagtgccacaaccaacattgtaactatggaagaaggacgaagaaggatcttgacgacttgctcgtgaccccctatctctacgttttaagttttaagaggcattgtggaagggataagatgttgagaaaaagggagcatatgatggaaaagaccgtcgatgacgtcatttgcgatggaaggaactattctttccctggacgatgacgaggtaatcgtcgtctcaccattgatgatggttttctgattacaaagataataggtttcagatctccacatgctttcgcatcatccttgaacaagactttcgtatctacaattattttgtgtatttttgtattgatttcctagatcttaacaatgtacacattattgtatagatttgtgactgaagatctgaattaaattgcacatatgcatgcaaaaaattgcacggacgcacacaatattgcacacaggcaaattgcaaacacgcacacaagaaaacactaggaagtgagttgtattgttagggagttttatgatgtatgggaagattaattgggttagtttttctgccctttattatttcttctcggagagcctcatttccctaacatatgttcaaccctcgaccaaacactcttgagatgaatgagtcatcccacatggttccaccattttcataggttatggttgtaagaccccaaccaaacccaacttaccctaagaagatgagaaagacaatttggataacatataacaaggcaaaaatgacctttttggcaatttatcccttatatctagcatcgacataaggcttccttccttaagcatgctcttgtgaaaaaacatatgcttggagacgaaaatggggctctccagtatcttatggtcgtagcctatgaaaacgacgggggccctgtgggaaaactcatttttctcagatgtgtttggtcaagcccttaaggtaggcttaggaaatggggctctccggtaagttggatttggtcggggtcttatgatcgtagcctatgaaaacggcaggaccctgtgggatgacttgttcatctctagagtgtttggttgggggcttaacgtaggctagggaaatgggattctcatgtaagttgggtttggtccgggtcaaatcgaaatatgtcattgggtatttgaaaatgacattatctagaccaatgctaattgacttcaattgctaatggaaatgtaagtaggctcataattttagaagaagccatatgttcatgtaataatcacacactaatgagcctgtgtttgtgagtgtgcattatgttagtcgtctcatgtactatgacctgtttaatataactatatattaaaaaaattatgactcatcaacctttattaaaatgtgtcttcttgtgcaaatctttcatattaatatttttaacttgtgttaattgtgatataaagtatgactcgttattttatatatgtaaatgtatagcttacattgattctggtgcagataaaagtaagggtgttcatggctcggtttggttcgatttttaataaaaagtcatccaaaccaaacttaaaaaacacgtgattcgattggtttgattttcattaagatttatatattttcttttcaacttttaaattaaattacattaaaaattgctaataacaatctacgaaacttattaatatgttaaaccttctataataaaaatttatcaaattttcatcaattttaaaccaaacatattttaaaaaaagacgtctaaaaaaattgatatacattgtataaattcgtatacataacactacataacattgtgaaactcaaataacatatacataaaatagataacattaaagtaatataaattttatgatttggttcaattcgaatccgtttcaaaagcacaaagttcaaattgaaccaaactgtttagtttgcgaaagaaaaaacatccaaataaatttaaaaagaatcaatttctttaggtttttcggttttttatttttagtggtttttgattttttactttggaatagtttggatttgaacactcttgaataaaacacactctgaaatccagataggtgatagaatgagcagtttttctgtttcaagtgcatatgaaaggataataattttcaatattcatatagtggaggcttttggaggaaaacatggaagcttaaataccaacatatatatatatggtagcttcaaactagtgagagggtccgagtgtttattggcaaacagctcatgctagattgcctactaagaaggggatcgggttctcctttttgttttcattgtcattccttagaagaatatattttgcatgttctttgtgattgtccttcagcctttactgtttggattcatcttctggaacctgaattcataaatgtttttgatgtgtgataaattctctgtaatagaggacagagaaacctccaaagaagaataacaagagagaggaatcagacaatattcagcatttctatagctaggccaatttccttattctaatagagttgtccctctaacagaatgaccccattcactaacaaactcacataaccctcctccagaatgttctactctgtctatatcagtaatagatatattcagtctcacacagtttggcttaatactcctcttgggcctatgctggacttcctcatttttgcatttggggcacaacatcattgatcatatcagttttctttacaattggattaatcttaatcttgataattttatgggaagcaagaaagataaatgttggtctactttatgggcggttgcttgtcacaggttgtggacttggagaaataaacatgtccatgaccatgacccttcatttgtttgaccttataaacctttgggagattattacaacggcttggaaggagtaccatgcaatagtttatatcagttgcctcctgttcagcccaagagttatacaaatatcagatggattgctccatctcttggtaggagggttactctaaatacctcggtgaatgggatcaggaatgacagtggaaagtgctttggaggatttgctaggaagattggagttaattaatatcaagaatattgcggaggtcttagttattcagttttaaagtttgttaattactatcaggatccagctttcaagttcaatcttctgaaagtaatatatttgttttaaacataactacacctttggatgcgcaggtctttatatgaaaaaatattacagtacattttagtccttatagtatgaaaaccgtttataaattgatctttattatttgtgcaggttattgtgacatttgactttgtcattagacatggtgatgtatggtaagatattttagttgatttttaatttttttattaattaaaaaatttgtttgattgttagataaatatttttgtaataatttttaattttttaaaatagtattttactttttagtttctaatttttaatatatttattcaatttcatattttaaataaattataattttattattttttatcattttatatttttcaattactaatagttagttttatcatacacttgtaatttaataaactaattttaaaattttcaattgtttttaccaaatataaccatcattttttgtttttgatacttacatcatctttagctttggtctttaatggaaattttatattttttgttttgatctttatatagaaaaaaaataaatatatttttcgtcattacaattttttattttaattattgcaaaatatgttttttgatttttcatctttaaaatactttaaataacatattttttattgtttaaaatattttttactgtttaaaataaatatattttataaatattaaaatgaaagaaactataggaacaaaacgaaaaaatagatgaaaaatatatttaattaagaaaaaaatctagattttggtgtctacacttgacatatcgtcctttgttttaatttcctatattaacatttttgtggcaccgttataattttaataaactgtagatactcataatttataaacatattatgtagatactaaaatataaaatctttttatgtcggaaataaaacaacaataaaaaatgtcatatacgatgaataagtttatgatataacctagacttaagttttttttttagactagaggccctgaaaagactgtgagccacaaaatttgcttatctcccaaataagtaacaaagcaaataacatagtttagccacaaatctaatcgaagtatctgttgttcctgtagccaagtaacaacctccaatcatccctaacacacattctcgtacccgttattagacataaaagcaggatctgaatacgtgggtatccgtctgaatccaccccaattttaatagaaaaagttcgagtttatcagatttaggttcggatttttcccgataaccaaaaacagggacaggaacggatatgagattacttatacttgcctcacacccgcacctgccctgtaataaataatattaaaaaaatatatattattttgtaattttttttattgaattgattaattttgttatgtaacttttaaattatgactgcatattttgaatatgggtttgttattgtttttttgttacgtaattaacatttttgtccgattttcaataattttttattttattttaatcaaagagcgaggagggcggggaaaacctaaccccaatggggcggggatgagtatgggttttaaaacccgatggagatcggagacgggttcgaggagcgatttttgagtcggggacggggacgggaaatgcaatattcacccccgctccgcctcattgccatgcctaccccctatacctagattttagttttgacgaccactttttttatttattggtaattctaaccggcaaatttcatatatttattttggaagtcaattaacggaaatatagaactcaaaacaaattacttaagttgtacttttggagatgttctaagataacatcatatttttaataaattttttatttatttaaatgttaagtaatataaaataaaaaatttaaatatgaaccacttcaccaaattttctatatatttgtgttttatttaatggaaactctattatctatataaaccagaagaattaaattagaaccgatttacaagttttctttattttatatttaccaacgaagcctcagtttttcattatttaccagatgctgatgatctgttgactttagttaatcactatgcatatcgtgtggaagattaactccatttgtatttttttttttttaaaaaaaactcctttcgtacaaaaaaatatttaataaaattccatcctcatgattgcgatataattaattttacacaaaaataaataataaaattatttcacgtatttattttttatatatattaaatatctcttattcaaattttggttaggagtaaaaaaaaaatagaaagaaatgcttgggaagcaaaaagaaaaagaaagacgtgaaggattaaaagttaaaaggttggggagaaggacatgacattgttgtagtgatgatggaagtgatgatatgtgagcatttgcggtattcagcactctccatcttatctatttcttcacctcgttaccatcgctctataccttcttcttcttcttcgagccttaaaccttcttcttccttttctgtgtcttgctctctcatggagaatcaggagacccacaacaaccaaggccgcagcaaattcatggactttccgttcgtttcatctgcccagaagaatcttatggttgatctcgtctcaacgcttgagaatcgctttcacactcagcttcttccttgcacactcccctctgatgttcagtattatcaaagccaaactgccactgcccaagcttctcttcatattagagcagctcataatgactccccggtaattccccctcttctttctactcccaaaatccttagtgcttgtttggattagccttaacaaaattatttttaaatgaaattgattttgtagtgatgtgatttatgtttggatgttttcattatggaatcaaattatgaataaaacttaatataaagtttttgctccaacgcaaaagcaaagttgccaattctggatcagaatcaattttgaaatcttcagatgtgaaatcaaatatgtaaaaattgatccaaaatcaattatgtaccaagaatcaattcttgtgaaaccaaacacacatttaatttcaatactaagttttcatttttttctctcttttttttttcagcccctacattgttcatgttcccttgccaattatttatcttcccaaattcgttttgacttattttttagtggcttatgggtttctaaatcaagtattggcattatcagagtattgggttgagaattaggtactcaagctactatgtccggattagatactgaagcaaatgggcaatgtataacttttgtctttttctgtgcttcaatgagtaagccatcaaatttatccctaaatttatagtatttatataaatgatccctcaatgattagaaatcatatttagtagtccttcaaatattgaaatcctttaaattgatgaatatccaatactctaagaactatttaggagagagggtaatacttgagagttgagagactaaattggtggtttactcttgctttaatttgaatagcaatggcaaagtgtaaacataaccactcggtcagcctagcaatgaggggtttgagtagtttgcaagagttcctaagatcaaatctcattactgtcattgtacataaaaaaaaaaaaaaaaaagaagaaggaaaagaataaacatacactcgaattttggggtggatatgtgtaaggagaaaaggtccaacacgaacagaaaaaagaaaaggaagagaaagtgatatacgtgattagggatgtgaatgcttggttccgttctcttgccaggtagctactgctgacatttttctccacccttttaatggatttattttgtttagaagaaaaatgatgacatttgttttgttctgaatttggtctttttttggtgtttgtctcagatagattttgtgttgggaagctgggtgcattcaaagctaccaacaggagggtccttagatataacaagtctttcagcctatcttaacagctcaactgatgcgccaaattttgtgtttgaaatgatccgcagtagtccaacaatgctagttctcattcttgatttgcctccccggaaagaccttgtgctttggccagatgacctcaaaactttctatgaggacactcaactagacaaacataggcagactctggagagagttccagaggttcaaccatacttctcttcttccctttacatccgcactgtttcctctcctacagccataatggttcgcgttctgacggaaaatggcggagtggaacgcatggaggatatcatcagggaccatttggaccccatttccaagcaagtgttggggatctggttggatcattgtgcttgtgccaagcgagaggtgggagaggcagaaagagcttatctgaaaaaaagggatggtctcattagaaacaagaccattgagattgatcttggttcaagctttcccagattgtttggtccagaagtagcaaaccgggtactggaagctatcaaggagtactttactgtctgaaatgcaaatttatttggaattgttggatattctatgtattacatccatgtacctaatttgctgtgtaatccaatgaggcctccgtattttctgaatctctctaatcaagtataaaatccgtaaatgattatgatggtttctactttctcccccattattgtctgtgtatcagtaatcagttctctgcttatatatatatatatatatatatatatatatatatatatatactaggtatgattcatatgacagtagcacttatctaattgcatctggttcggtttcaaactctttgaaggagtagagttgccaaacgccacgattaacttcctgaacaagtaggaaaattcttgaattggaagttttttagcatgcttgagagttgagagaagctggtgaaatctgaagtctggacctaaaataggtcaagtgccattcgacatgatttctataaaagaaatgttatatggctcgcttatgatctactttttacgtagctagtgccatttttttaaccaatatttggacacatagtgccatcatatttttaacattgcttacttgcgtttaaattcgttgaaaatgtataaaagttaaattttcattaattcacctcgcttatcataaaaaagaaaggtacatctggcaactcataataaaaattatttggttcgttaattctagaaatgttatgcactccctattaaaaaacttttagctcaaacacagtaaattctggcatcatagttttgacattgagaaacagtaagaaagaagggtcatcaatatttgattcacgatcagcatcagatactgtaaagcacatatataagttgcatggcgaatatcatatactatatgtacgacttatattttcagcgtataataggattcctcacatgttaattagctcaaagctaatcagtatacctactccacaatctttttcaccatatataaagattaaaagccttttaatgattcttggtgatatattttcttttgatattggattcttagtgatattatacctaagaaacccaaatctcaaattaataacgtaaacacgaagcgaaatatgataatggttgctcttggagaaaagagtttccattagaaaggcccaaaatgaacttcatggcagcaatacgtgcatggaaacagaaggcacgaaaaagctcttggagagttgccatatatacggttctagttcctatgaatgagagaaagaaaagtaatgcttattcaaatgtcctctcaaatgcaaacacccaaggacttgtggttgaatttgattggtcaagagtgacatatagttagcaccaagcaatttttgtaactgacacgaaccttttgtttatgataattaagagtttgaaaccattggcaaataagtaataactttgccatgtggttagaggtttttaacataatttcttgtgtattgaaaaacaatgaattaaccctttaaatgatattggtatttcaagacattgttactattcatgaatcttcgaatcatattttctagaaacgagtaaaatctatttgattgattgattataaaaacatttacataaatttcttaaaacttgaaggattacgtgatatttttatagttattttaattatttaccatttaataagaataatataatatttttattataataaaagaaaatctaagctcgggaaaataagattctcacctccatgagaaagtttttgtgaaaaataatttcctgaaatcttattttcttaaaacaaataccaagcacaagaaactaaggtagtgcttaatttgagtgtttttttgttttcatttttaaagaaaacaaaaaataagagtaaatgcatttgtttaaaacaaaaaatattttaaaaaataagcccacaactgacaataacttatcaacatttttaatttttttatgaagaaatgaaaacaaaaaataaatccttaaccaaaataccacctaagatttgcaatctaagattcttagaaaacttaaaacttttttcctaccaaatgaatctttagttaaaaaggagtttgaaatcatttttttctggctaataatttaggtgaattgaataccaggattcatagagtcatacaggtttcaaacataaaaaaatatttacaaaaatatttatatattatttatcaatagaaccctcacatcaacaacaaaaattaaatttatattcttttaaaatataaattcgtttgttatcgattggacgaatctttattggtagtttgaaaccatttttacttatactagagtaaattttgcttatgataattagaagtgtgataaaagaatgagacggggcatgaagatttttaaacatgagaaaataaaataatataattgaaagtgacatctcaacaaatgtagaaaacatttgacgtgacaatgttacatatgaataaataaataaataataggttgaaatagtatgaggtaataagcacaaacaattggaggtacaattttttccctgaactttattgtgaattccatataattgttacatgaacttttttctttcttatgtaaatttcatataagacattacgtttgcggattttttaacttatccatttttattcaaggtgagacttatgcatgcgtgtgactgtgtgaataacactgaggcagtacatattctgatattcttctttcggcagccacaccatatcatttcgttattcggtatatattaaagtgaagtgaatctctctttttaaacaagtgaacttgataatgctgaactatcaaggcatcgatccttaacatggaaaaaacttgtcaatttggcatcatctatcactgtcttaattacatctgcagagtttttcttttctctcttactttcgttttgcattattagtgagcatctctattcttaaccaccgaaaacttcaagcaaaaggaaaaaggttatcgtatatatatatctaatgaaaattaagcactacttgcgttttcataaaataaatccacattcttttccatcttttaaagattcggaaaacaactaccaaactttcaaattttaaatgaaacttcctaatctccgtatatgtaccatatataagcttaaattaagtttttatattattccgttgcacatatattaagctattacctatacaaatagaaacgtccccaaagtccaaacaatcatttattttcctttcctttccgtgtttgtatttatttaacagtttcttaattattatttttttataatgacgatcactcagttcagttcagaattcatagggaagttgcatctaagtccaagaaacttgcatgcttcgtgaagtggacaaaacaaagccagattttatacctttttgtatttcacatgctattgttcattttaaatttttgtggacagtagcttcataaaggagtttgaaagatcattatttcaaaccctagtcacaggttgtcctcaaaacttctcatccagttagtttcagagtttcaatctagtgtcaccacagagataaacagcaacatgtgtattactaatcaggaagctatcaagcagttgcagtcccttatggaaaactgtaagcatttagcatacacttttctgctaatagtgttttgttagtgaccaatatcttctattctttccatgttttttttaatatgtttttctctcgatgtagtggatgagcaacagaagaacacattccaggtttggctcttcagtctcttggttttacttgatcttaagttttgagaaagataatgacaaaaagaatcagtggaagttataacttgatgaatgtatctgttcatcttggataaaataagtcgccacaatttatatttatattttaaaaatttcagttggggtgggagttttgaaccaaaaaattaaaattttgcttctaaattgatcttgatgaccagtacctcgccgttggctagaattctttactgaagcacagctgcgaacattatgataatagatgttgatcatcatgagtgtttcctttattctgtcatgaaagcttgctctttacatttcagattatgcaccggggcaatccaacagaaacattagtacggtttctcaaagcaagggatgggaatgttgtcaaagcacataaaatggttagattgtgtgcagtaaaagttttttgttggaaattttcccaaattgattgcttatagagttatcattggatatgaacactttgctgacggttttaactataacagttaattgattgtttacaatggagagtggaaaatgagattgataatgttttatcggtgagttcctttactgtgcatattattgattttggaacaacatatcttaaagcagttaagcattatgtgacagatggagatacggatgcatgttttctttctttttatattttggggggagggggatgaattcacagtatcatgtcagtgtgtcaaggaccaaactttagagataccgagataaagatgcatgttattgcaaaaagtataaaataaacctagttatcactatcactggagaatgaaatttacatggtctctgtagttatttgatcatatcacacttctagcataaactagatgtctatcatatttctcaatcattgtgaattcatgatcataaaagtctatcattgtttaaattttccttcttttttgtgttaacagaagcctataccccctgatttgtacagacgtttgcgagattctcaacttgtaggaatgtctggtttctcaaaggaggtataagttttcatctcaggcataaatttattttattttcctcctacccagctaccctcatggttcttctctgcctctaacctgtatgaatgaatgatgtgtaagagatgacatctttgtgtacgactgtataaacatagcagatgatcaacaagatgtcatctcttacataaagtaacatgcatgattgctaatttattttatttttggctgagttatgccagggcctacctgtcattgctgttggtgttgggctcagcacatttgatgaagtgtttgtaaggactacataccatctctaagccatattatccttatacattggtgctgcagtgttcagtgctgcttatctgtccattttcctttgtagcatgtgaactactttattatttttcatgatgttaaattgccagttatttttgttcaggacaaatattatgtacagtcgcacatccaaatgaacgaatatcgggatcgagtgatgttggtgagtatctagagtgtctttttttgtccctcataaattctctgacaccctgattgtttattggaatttttattgcagccaaaagctacaaagaatcatggacgatacattggcacttgtgtgaaagtcttggatatgactggtttaaaactctcggcactgagccaattgaaggtatgccagtaacttaaaaacttcttatttctctttctcttcatgtttttaatcatatgaccgttccttgattggccatttattgaagtttttctcttctcactctatctatccactagatgatctcctagttgacactttctgtttggccaccttcagcttttgacagctatatctacaatagacgacttgaactatccagaaaagacagacgcatattacatcgttaatgttccatatgtattctcagcgtgttggaaggtttgtgccagtttttatgttgaaggagttcatacggatctatcaaaatcttgacaattacagctaaactcttcaatgacaatggcaggttgtaaagcctcttttgcaagaaagaacaaggaggaaagttcacgtactgaaaggttgtggcatggaggaattactgaaggtaaacattagcatacccctcgtacagtatatcttttatgagttttccttttagttctcttgactaaattaaagtcatattgtccattgttcttgttaataattaacctgtgatatggatggagacttgaaaaagagtactaccgaattgaatttacttcattcttactagaatttgttgcaactgcgagggtttgacatacttaacaatttgaacaggtaatggactatgcatccctccctcatttttgcagaaagaaggattcgagggtgccccgacatcatgtagctggaaatagtgaaaattgtttctcctttgatcatgtcttccataaacaactctataattacatcacgcagcaagctatattcatagagtccttattaccaatcggacaggattcgttccatgtagacttgccagagccagacccagatgatgccaaaattgccaagactatagaaactgagttccacaaaattattattatagattaaataacaaaatgaaatatgactcaaaaaaacttggaggattggattatgtctgcagtgacctgcagttactttcaaactgcaggcaattctggtcctatcgagttacttgttctttgcagttgttatattcagttattggatgtaatgtaatatacgggtattacatcaagttgccacaaacttctgggtgaataacttttaatctaatttttataacccctggacgatgagcaagtaaattcgttcagtcttggaagaatgacatcaagttacagttttttctttccccgtcaattaatggtatggtatttatacaaaaatgtagaactacagtgttcagaaccgtgcctgccagacagtattatgcatggaactaagaatagaacagttggagaaaatatattttcctcatgttgtgacttatgagcactattatcctgcaacaaaaattttcctttttatatcaaatatatcaagcctaggataaaaaaaaggccatgccgttataaactacactacaacttattttctcaattatattcatgattcctccttttcttgacaaaacttagggctagcattaacctgaatatctttgcatacggtggtattttctattcattttggaaaattattcatcaatcaggtgctagatgatttcattttctgttcccaatatgggtaagagactctctgaaggtgctgcattcttttatatgaaagttcaggcaagactatcgtcatttgtcacctatgcgccacacaattctaggattaactagcaagttcgaggaacacaaaaagctttacattaaattgtaaaaggttacaaatcaaatcctacctaaacaaagtgttaaaatattaaatttgattactctgtggctttacattaaattgtaaaaggttacaaatcaaatcctacctaaacaaagtgttaaaatattaaatttgattactctgtggctaaggtttcttatatgtacaaaaataagctaactggcatattataagtgcctcagccaataatactctacaagcactaaagcgcacacatcctcactcgtttcccagcatgttcagtaaggactgatctaaagaagaactgcactaatattggacatgaagctaatatccagatatagtaaaggcttaaggcttgttttatcttggtgacttgttggtcatgggttcgaatctgaaaacagtctctttgcatatgcaaggataagactgcgtacaatatctctcccccttacctgcgcatagcgtagagcctccaggtaatggagtacgtagtttttttttttttttttttttatagtaaaggcttaagttatctaaaccacttaataatgctgccaaagttgatttctcttatctcaattgtttgtaagagttataggcaatggcaactgatacagcagcacagaaaacagcaagagctgcataagtatcttcttgctcccagccattgagccaagttgccatggacggaaacttgcacgaagctcctttgccattattgatcctattgatccaagaaatcactgtctcactgctcttattatcagctgagagctttgcctctgattcaatgacatcagggtccattcttctttccaataacacgtgattctgacggaaaaaagagtctccattagattggcagcagccaactccatttgattggcagcagctaactccatttgattggcagcagcttacagaattgtcttgagctctacacccttgagtgctgtcttctaagtttctcaagtcattcagcagaagccgctgttcttgctttttcttctgttcatctactgataaacccatctgacccctgaaggcaatataaaaaaagtaacatatacaagtaagcatatgttccatggacctactatgctccaaagttttcataaccatcagcctgatacataaccatggaaaggatttcagcatgtcaatttccgaagagggaatctgtcacccaatgcatcaaattttttccatcgcaaaaaagggggcagaaagaaatgtacttgaaaagtaatggttgaagctaggtttctgaaaatttagagaaagagtagggaataacattacaataggagttaattgtatgtggctaagtccatggtttggaatttataattttaatttgtgaataaaaagcttaaacagtcaacaaccaaactggtaggtcacagatgccatttaaaggcatatgaagcaaagctgtatatcttcagataaagggtatgaagatgccacttcttgcctgaccacaatttcaatttgaaaatttacagaagcctagctatatagtcttttataggatgaaacttaaagatgtaacctttaagccaaaacattaaagaagataaataaagcattacaggaaataattacctccataatggatctaaaatctccccctttatgatatggtgttgaagcaatgaaggtacatcatccggggtaacatagccatacctgcatattttaattgaggagaatatcaatcagttacataatcaaacatattaaccaatggtacaatggtattgcatgatttaaaacaataaataaaaatttctgtaactgaaagtagcagttttagtaaccattaaggtgttctccttaccagtggccagtgacttctccattcatgctaggtccaaatacaatgacatttccagcatactgacttgctccaatgtgtgaacatgggcttacaaagacttttccttgaagaccatgcaactctatctcctccctgaatctactgaccaagacaggtccacaaaccccacatctgcgatcacgggatccatgcgaacacacgaaaacatacgaacctctcaacacctcaggcgttccgggaagccattccccatccttcacaagaacctcctcaacaaacgtttcaacatcaaaatgcgttaatctcctgcaattccactaaaacctgttgtccacaatgatctaagaagcggaaaaaaagggaatcaataacagagaacctttaagatcaatactctcacctgtatctaaccatgtcaggaaagatcaacacatccccattagatgtctcagtcccatcatgaccctcacatatcgttaaccgaatctagtaaagagagaactcataagtccaacacaatgtaagatgaagcaacattttcaccagatattcaattaactaactctttaacacatacctcgaacagtgatatagccaaaacagcgtatataagtggacataacgcttgctaatatcaattaccttaaacagcgtacacacaaacaaaatccaaaagcaaggggcggtagagtatagtatagtacctccttttccatgtgactcttccttgcgacaacggcggcatggagcaacctcggcaagcgatcgaactcggcggcttctatgcgcggtggccagacgcgagggttcttgtagcaaaggaagacgtggcgtcggtagaactcgacggtgccggcaagggggctctgccggaaatcgggtcgggagaaaccgaagtcgggatcgtcggcggcgacgtctccggcagagagaaggccgtcgttctggaagcttccggaggcgcttctggggtcggcgaggtaactgtcgagttggtcggagacggtgatgggagaagaatgggaagaggaagaagggattgtgaatgtcagcgattcttctctctctctgttactcgccatagtagcagaacacaaccaatctctctctctctctctctctctctctctctaacaaagtaacaactttgtgtgagtgagtctgtctgtgctgtgcttctaattcaatagttcctatttcgaggggtttgatgatgttggaggaggttgcgttcctgtgaggttgcgactaggatttttcggtggaatcgggtcgtgcatcaattatgtaacacgtgtcattcatggcttctttgttttcttgatggtgccaactcacgacgatccaatctaatgcccaaaccttcggcattcctggatctactgatttcggggattctgtagagttgtctacaaattattaactgcaaccttcatgcaaagaaaagaaagaaatacaaaaattgttataagagaaagaatttataataacaggatttacaaaaatgtttattataatggattttttttaatttttggtttattagcttatgtatttgatagatagcataaaaaatttgattttttcttaagaagtattgttgtatttataattatttgaaaacaaatgttatataatttttttattctcagtataatattttttttaaaaaaattgttttatccctaactgcaattttttttttggtttaaagaattattattagattatctttcttgcgattcagtgcttttactggaggcctaatgttcttacatgttcatcttattacctaaatacaaatgtgcccatctaatagatgatattattatttattgtttggcgtgacttcgggtgagtaaataaatgggttccacctgaacccgaacccgacataatcaaacttaaaaaaatgaatttgggtggatttagacggttcatagataagcgggttttaaattcgatcccaaatgatttttgacaatcgaatttaggttcacaatttttaatatatcgatatccgacttgactcaatattaaaagtttaatttcaattttttaaccttttagctatttaatttcaattaaagagcccaatacaaaattcacattaaataacaaaaaaaaaatgataaaatatgacttgacaatatggcccaatacaaatgaataaattaagtaaaaatttgaaagaaaataaattaagtccaaagtgtcttgacccaatattggtccaacccgtttggactcaaccgtaacccgtccaacctgaaggcaaaaaacagtcagaattggacctttttgtaatttatcagatggacccgaattactggacatttgatcggtacatgacaccaatgtgttcagtcttccaaacatgcaaagaatttataatctaaatcattttcaataatcttattttaattttccttagtctttgccctattattacaaataaattatttttcacttgatattatgagggtttcgttggtcctcttcttttgtcaaattatcttattatctaatctaatgaaaaatatatattctatggtgctttaatgtaaatttgttacctgttttctaggaaaaacagcttgaagcaacatctcatttttgcctcagtaatacagtttgccaaaaagagaaatcctaaccatgcctttttattagcatttcataaagcatcaaataagcaatgtaaaaagagtaataacaattgttttattagcatttcataaagagcatcaaataattgagaagaatggacagataaaggtatggtttttttaatagttattatcatcattacagtgaatgccgtaaaatagttcatcatactacctcatgaagtagcaatatacaataatatactaaagtttcattaataaaatacttgtgaccaaactattgacaaaaatctgatcgcattggtctcaactttcacaaaaaccagtgtgtatctctcacattcatgagccgcacaaaactgtaactaggcaagagacatttcatacaggattcttcctgggaagctaagaagaagaacctccctcaacatggttccttttcctgtgaaagatgccactgatactaggcaagagaactttctttgaaactgacaccttccctttttctaacttcatctccaccttgtttggaggtgaattctgcatttgaatcctatagtgctgtggagaaagttctggggacatcagtgtttcagccaatattcgagatgcagcttctgctgctttcttctgctcttgttcgcgccactttctgagctcaccctccaccgccctctttgctgcttcagccatttcagcccttttcaacgctgcctgtgtttcagtcttcatatcctcaatttccttttgggtttcctctaacctttttagaaattcattttcactagcctttgcaacttcaacctgtgctgtggcagcagccacttttatgtctgctaatttatcagactcctcaacctttttaactaagcattcaaactcctctcttgagattgtaattcttgcaccaggttcagaagttgatgaataagaaggactagtcctcatagataaaaccttaatctgatcaagagcacttgcctctgctgctttagctgcttccacttcttccaacactactttaagctttgtttctgcatcttctaacacaagtttagtgactgcagcttccatcttcaattctgctgcctcattcttcataccttctgtttccctttttgcattttcagtttcagacaacaactgttttaatgtcaagatcatttcctctgatgcacctctagctttagattcttctgccaagtaggcttcgagtttagactcgcttttccggagctctaccctcagattctcgacaacagattcagttttggattctttctccttcaattcagagtgttctctttttgcattctccagctccatcctaagagcttccaccatgcttctaagggagtcttcctgtcctactactttctgcagtgattccttagcatcaccaagctccagagtgacacttttcaaagagtccaagtctgatgtctttttatgttcaatttgcttttgcagaaccacaatttcagtcattgtctcggtcagctgcacttcaagatttttggtaagctctggattgaattccttctttaaatcaagcaacttcttttttgattcttcaagggtggcttcatatgattgtcttggaactttttgcttggctaatgtctcttcttgaagttgatgtgcttggacagattcagcattcattttctcaactgattcctgtacagccaaaatttctttagatagctcacatgctttttcggtgtttgccttcattgcatcttcagcttctgctgcttgcttgagagcagaaactcttgctttcaaggataaatcatacccctgacgaattttactcagttcttgcttttcaacatcaagttctgtaatgacagaagcataattattaagggcagtttctaactcttctttccaagcaccattggttccaccaggatcaccacatttttcttcaagctgttttgctttattttttgaagcttctgttgcctgaattgctgattctctggattcaccgagaactttaagcttttgtgagagatcctcaaccactcttttagccttttcaagctccaccaggacttgagccttggtagtttctgcattctttagttgttcctttaattttttcaggtctttctgggctaagtgaagttgtctcacctttgcccaaacactctaatgaaataacaaaccatagaaacaattttcacttatgtggtaaatgagagcatgtcattcatgaatatgatacatgttaacaaggacatgtcattggcaactgaattaaagcatgatactggattgtgttgaacaattgtcaaattttgaagtccaaattataacaatatagaagattttgaactaataagaataaaagtttccaatttttttcacatttcaccccactcaaaactttttccatcagaacacgtggtgcaaacacaaatttagattcatagtaacctctacaccaattctaggaatgagttttacactaaaactattggtccattataattttgtctttttgatatgcaacttcagaattcagatatagttttaaaattacggtataaaaacagttacctcagcaaaatacgattttgccttcttaatgggagcattgggaggtgtttcaccagagaaagcaccttcgccaaatagagaaacagcatctttaacagattgaaaaggtggactggtgtcaatctctccaaccactggttttgtgggatttggagagttagcagcactttgcctgattttggctaccatattgtcttttatttaaataatattaacggcctttgaagccaacctgcaaaaaaaaaaaaatgttacagtatgaatatgatcaacacaacacattgtaaacatcaaactcaatacaatcacacatatcagagattcttttcaaatccacacaaaaagcaaccaccaagtagcctattcagacattttaacaaaaccccatcaacaaaaccacatcaaagtttccatctttagctgaatccacaagaaaaatcacctacaaatatcaaaaagagtaggaaaaaaaaaactttcaaagaggtgcttcttgaaaattttcatgagaagggaaagtgtgacattgaattgcagagtgaaatcgcgacgaagaatgttcacataattgtgaggagggaaagaaagaaagagagagagagagagagagagagagagagagagagagagatgagtttggttgaagtgaaaattgcgaaaaggtgcggtgtgtttaaagacaaattttgcatcagcatgtcagtttcagactcaagagtttaaaagggaataatcatgtgcaacttgttcctattcaagattcctctaattcagttataatggttttaagatcatatatgttatccgtagcactatgcaattgtgacttgtgaaaattctgtcagaataaaagttgcagtaaagatggttcgccacgtcaccaccaccctcccttcacaatgaacaaaggaaattttttatttaatttatttaaaaaaaaatgagagtgacggtgatgtaaatcagcaagaaggcaaaggacaagctctcttgtcctttttcaacaatgtgtctcgaacatgaacatttgctagcaattatttgggacactcatgcttcatgcttcatacttcggttgcccatatacatcctcttcaacggtgatatcgagtagtagtaattcaaatctaatgcataaatatgtattatacctatacgggtaataaataattttcctctaaaaaaggggtaataaataatttatcgcatcgtgatttgattgtatagaaccgaggcacggatttgcacagggttactatttttattttttaagtttgttatctgatttaattaattataaaccacccgggttgatctagtgatagaaagtttagaataattttcatgatatcctaagttcaaatatcagtgagatctttgtagattaatttaattaattacggattgagattgtttggcatcggattccacttacaaaatttgagacatgaaaaaaagttacacttatatgaagtttctaattctctggttcattattgttcataggagaatgatttgttaatgtattggggccgaaacctcagaaaataacatggcaggtatatataagtcgccttctattgtctgaatggtgggacttggataagtctgcttgacctacaaatggattggagtgggcattgggcagctactaagtatttaaaggcccattatacttaatgcttttgctttcaaatccttttgttatggttattttctacttccacacctacatttcactatcaagtgaggaggatatgcccaaaatttgtactagtctatatagaaacgtgtataaatcacgatagttttagttggctttattatctttttacggtctatttaaaagaaagaaatcattatttaaattattttaagataattatattaaaagccaacaaatttatcatatattataaattatgatgagatgattgtgtaaatttttttacagggtataatcttttttcttaacaaaatacattttaaaaacttttgaagattttggaccatgaaaaaagttaattattttaaaaaataaatatttgagtagcttttttaaaaaatatattttttaaataatttccaatttattttaaaaaactgaaaactaaaaacaattttaagttatttctatttttactctttagcaaaatacaaattttacaaaaagataattataggtatttttgcatacacatccatagactaatattcaaatatttgtctttatgtacgtacctctgtttaatttgatatcgagaaaaaaaaaaaaaagagtttggagaaagggataaatagaattttcttcattaatttaaatgagagaaaaaaggataaaaggatacaaaagagaaatattcattttttttcctttaaagagaagtgaaaaccaaggagggaaaatggaatcattgtttgcatgagagtaaggcagtgatataattaaagggttgaagttgaggtgaggcagatatactgtcgaaataccgtgatagtatctgctgcatgatcattataattgtcaactcaatcaagtaagctacgctgtcgcgcgctcgctgcatagatcatgattaatagctgcatgcccatcattatcaatatttctctattaattgattagggtatgttaccagtaaacgagtgagtaattaatgatgattcattgtaaatgatcagtgtcgttaatgcaaccaagacgattcttcaataaataaaaaaataaaaaaatagctaagtattacattaatttccaactgggttaacattaagcatatatgaaactacaagataatactatctccacctctgtgatttacttctcctttctaccaatctgctccataagcaagagaatcatctctcttgtaattaattaaatttcccacactagctctaagttaattgaagtctgattaacgggttttgagattgatcttaaatcccatatataccctcaagaattcatcatagctgctagttaactagatatttgtatcatgcagactccatattattgtggactttatatagagagagatctgaaatgtcatattgggagtaaatgaaaagcatatccagtagtacaggtaactgaaattgttgtaagatcaaataataggcataggtagtgttgcagtatatattcatatatactactgaaactagtacccagcagggaattatgtttccacttaaaaagagctagtaattaaccacacagggaaccaaatctgacagaaggatgtcataaacaaatatcagttttgtggtgcgttttataagaatgcatgttaaatagttagtgaaactttcgagtcaacttgtggattccaacactttacatttcttggattactaattgggctttcgaattaaatttgatacatctctcatgttttatacaattatcttctttactgaatgaaacccaaaataacttagtctgatatatacagagcagatggcaagaaaaaagaagaaaaaaatggagaatgactagctaggaaaaacaattgcgattgtcattgtacatgccacaaaaacataagacaactcagttcttaataaagcatccaatcaaattaaaacatccaacatagctacaaatgggatggaagttgctggacattcaaaatgcacaacagaaaaaagaagcctaaattttcatgacgaaaattcgtagtttttcttaatcgaattcaggtgacatatttcattttttttttttaattttctattttatgataaggctccaatgaatcagactttatcatcattagtattatcatattactaaagttatatttttattattattttcacctataacttacgtacattaaaaaggctatagcttatcataaagatttatttttctcactcataatgtcttagtattattatgacttattattttgatgtaattaattattttattctagttgaatgtcttcttaaggctcaacctttgggattttttgttttgtttttggtacattcaacctttgggctttaaaagaatattatcttagtgttaagtctttagtactacgatgttactgttggtcccaataaaattactcctagtccctatcagtcaaagacaattatcaaactacccttctccacctcaccccaccccaccccacccttcccaaccccaccttgcactcatgctgccatgcttcttttttttttttttttttcgtggtcaaacgtaattatactttcgttgtgaaattttgcacaacgaaatcacaattttgttatttttggtgttgttggtgcacgacgaaatcattattccctttggggctttaaaagaatactaccttagtgtcaagtctttagttatagggtgttattattggcccaaccaaaattgctattggacccaacaaaatttctcttggcccctatcaaccaaagacaattaacaaactacccttccccacctcaccccaccccacacttcccaacccctccttgcactcacgctgccaagtatttttttttttgtggtaaaacgaaattatacttccattgcaaaatttcgcacaacgaaatcacaaattccttatttccgtagttgttgatgcacgacgaagccatgattccgttgtgcaacaacaatccgttgcacaaaggaatcatgattttgctatatgaaatttcacactttcattgtacattttttctctccgaaagaatactaaacgaaagtgtgacttcgttgtacaatggaatcacactttcgtaatactgtcatgttttaaccttccttgcacaacgaatcatgattttgttgtgtatttttttcctccctgaaaaatattacgacatcatatttttgttgcacaaaaggaagcgtaaattctatgcgcaatagaatcataattttgttgtgcataaaattcacacccccttttgtgcagcaaaaacacgataccataatactttttggagaagagtaatcttggaattttgatgaattataggaatcaatcgcaactaccttagttattagtatttcaactaaaactcatttggaaatgatcctcctcaatgcatgtgtgtaagagggaaatggacatgtaaagagaaagaagaaaaaaaagaaattgagtccatacactaagctgtatttgtttaaacgttgagttcaattgaatgagaaataatatttttggataaatagtcattttcgtccctaaacgtgtaaagtcttgacaaatttgtccccgaaagatgaaaattcaaattttaatccccgaaaatgaaaaaagtgcgacaaatctatccatccgttaacttctgttcgttaccgttaatgaaagagcctacgtgacgcatttagagacgaatttgtctattgctctgaaatttctaatatgacagtaccgtacccaaaatatgagactcaaataaaaatgtatagccattaagttaatccttacaaaaaatgagactcaacttgattttgtcactgcctaatgttgtcacaataaaaattttaaagtaacagaaaaattatgtttattaatcaatgttatgcttattattatgtttgttttcctattttttaagtgtttattgtaatattatgtttgcaacgattaataaagggagaaagatgaagattaaattgtattttggataaatagtcatttttgtccctgaatatgtagaatgttgataaattcgttactgaatgtgtcaattatgtctttcattaacaataacaaatgaaagttaacatgtagatgaatttgtcgcacttttttcatttttgaggactagaatttgaatatggataaatagttatttttgtccctgaatgtatagagcatcgataatgaaagactacaacttccttccccgtaccaagaggctagagcatactggcacgttcgatcccttccttgcattccaactgaaacattctatcagctaggaagttaagttatttttttgacaagatatttaaattagtttttaatttttttattaattaaaaaacatgttcaataaacaaattttcttaatagtttctaatgttttttgaaatattatttaaagtaacattttttaaaatattactttctagtttttatattttctttcatttttatcctcattagatttatctaattttttaattaccctttttaaaataaatcatgattttattatttttcatcattttatacttttcaactactttagcaattaatttatcaaatacttataatttaataaattaattttttaattaacaactaatttttcaattttcaattaacttttcaaaataattttacctaacataaccataatcaatccaaaatttcaaggcaatatttttttttaacacagtgccaatatattgcatagaaatacaaaactggggggtgcaagattaatgaggataaaagagaaatgagagcatggttgaaattgaagcatgcaaatgcaatgcaaggaatgagacaagaagaaaaaacaagatcccctccctcttacatgcacttgctaaaacaaaacaaaaatgccagacaactgaagggttacatcgcttgtacacaaagcctcacgcatttttaaaaattttttatttataaaaataacaaataaatttgttgaaaatatcatttattcattaatcattagcaaaaaaatatttttcatataactttttttcattcccatccaaacaagcggagagaaatttctttactattttctttcttatttatctattcaaacaacacaatttactcctaaactaaacaaagtataagtgagaggaggggagtaagtggtaaattcattctgctacacgctattattgtatatttgtattaatataaaagtttatatacaaataaaaaatataaaagattatattgtgtcttgcaccagatgaaaaatttaataataaataattaaatagtaataatagtctataattaattcccaagtataagttttagatatcaaatctaaccaaattttctatatctggttcttattgaatttaattgtcatacacgatgaatgtatatatataacaaatttatattgttatctaataaaaaattatgattgcatgacgtttaatataattattatgagaattaataaatttatcatatataactcatattaaaagacaatgtaaacttacatcgtcaacatagttttttttatcttttttatttcagtaagtttttgaattgttcatactattgacttgaccaatttccaatttaaaacgatacatgtgaagtgagtccgtttttcatagaaaaaggttacattcacaaacatatacaatagataaaatgacattttctgtatgttttttctcttcattttcttgatttacggaagattcaaagcactatgaatgaatgaccaaatcataatctgcgactgttattgactttatatattcaaaatacaaattggtacgtagtttaaaatcgacccatatgtcaatttgatccctctatatatagagagaaagagacattataaattaatattagcaattaaacttgtatatatacttatattatgcttataataattttttgtagaatacaaaattaactaatataataattgaatcattggatattatcattttgatcatctatgttacatttcacatatattatatattttttagtgttttatctagtaagtagatatttacttatattttataacagataacacgtgaaaataaaatagtgtgataaaataatattaactacattttatttagatttacttgaaattttataaactggtttaaaatatatatcggttagttatcaaaaatattttcttagaaaatagagtactacttaatgtgagtacatatgtgtagtattatttgaatatatgtatcacacatgagtgttgtcttttttatttaatttggtaatcactgtaattagagacttaaactctccaataatacctaagatatttttataaatttcagttctttaaaccaattataaaaataagttttgataagacttaatcatatttaaaattacattcatgctgacatagtggtaataggcatatcttaacgcatgtaccaatgtgtgataaataaaaaacactattcttagtaaaaaataattctagtagtattacaaccaatcaattaaagacactattaacgataagttgaatttaaagaattatttatgaaagtttatatattaaatcttaataagtacactcccgtagtaatactttcgaaaattctccaccacgttttgtccattttgtggaaacatattttattgaaattttattaaaaataatatctggcctgtataagatgataagaatacgtgaagaatattaatttcttatgaacaattatatttggaaaccttgctattgagttccatagaacaattttgagttcgagttctaatttacatttgggttattaaatgtgcagaggaaaactttaatcaccgaatggtcatatatattctaataaaacctctactatttctttatcttgctaaatgtcaaataacatataacaagttattaattacaaactcgtaagttgacataataatctaaaattacaaactcccataattattttgaccatgttttgtcattttgcggaatcatgtttgattttattttttgttaaacataatatctgcccagtgacaagtataagatgataagaatacgtgagcaccgatattttgagtaaatgattatttttatttttatatgtataaagtgttaataaatttatttttgatagataaaaatttaaattttagtcttgaaagtaaaaaatgtgataaatttatctattcgtcaatcattattaatgaaagaatctatgtgatacatagagacaaaaatgattaccaacatgattgctaaatagattggatcaaaatgtgaggaagtttttattggattaatttgttagatctcaaatttcgtttcatttaaaggtaaaatataatttaatcttcatctttcttcatatttttttttatcattgcaagcacaacattataataaatattttaaaaaataagaaaacaaatataaattagaacaaatataattataagcataatatatattgattaattagcagaatttgtcttttgatttgaaatttctattatgatagtattaggtagtgaaaaaaattaagttatgtctcatttttttataagaattaacttaatgattgtataattttgtttgaatttcatattttggataaatatattatcacattagaaattttagagcaacaaacgtctaatttatgtttgtttttctatttttaaatatttattgtaatattatgatttcaacgataaaaaatgggaaagataaatattaaattatatttttacccttaaatgaaacaaaatttgggttcgatgaattagtccaatgaaaacttataacattttggttcaatttatttagcaatcatgttaacaattattttgtgacatttttgtctttatgtgtcagataagctctttcattaacattaattaacgaaaattaacatattaatgaatttgtcatactttttttttactttcaaactaaaatttaaattttcatctttcaaaaaataaatttatcgatattaagaaaaagactatttacgatgatatttttattattcggtccgcgatgtgaataaataacattaatagtccataccatatgtaattgtccatctccctttccacacagcacaaacacagaatctcgtgagaaagaagctgggagacagaatgagagaggaagaaggtgcgagacaacaagagtccgatgttgatgttagtttgttcgagacaaaagaagcaagattccgaggagtttacaaggtatttgcatcaacaatatttgcagctatatgttttatttgggtgtacagagtggcaaacatccccacagttaaaagtgggaagtgggcttggattagtgttatggtgtcagagttgtgttttggattgtactggatcatcactcaatctgttcgttggagaatccttcaccaaacgcctttcaaacacaggctctcacaaaggttactttttcttcatcctctccttttactttttcatttttttcatgtccaggggaaaatattaaacatacacatacgtatagtgcttttttgcttacattatttatctcatttattgatttctctcacttgcttcatttccactcgtacaccttaaaattggacgaataaaaaaaaattatattctgtgagcaatatttataaagttaaaataacttggactgttggtgtaaaaaaatttacactgttaattatgataaatttttgttaatataattattaagataatttttataaagttaataaatttatcatttatatatatatatatatctatggtgaaaatatttatattatacattgaattatatattacatttcacatcatgagaagcatttgtatatttacacatgtgtatggagtacattaaaagaaaaaaattaaagatttgtggggacaattacccccaaagtataccaagtatatctgtcctgacatgtgcaagtatagaaggtggaatagtgtagggaaaatgaagcatagaaaaaaatgaaaatcgtgataactactataataagaagtatataaaataagttagaatatatatatatatatatatatatatatatatatatatattatcctttgagaatgacgatcaaactgaatccttgcaagatgcactcaccacactgtggtgacttcaatgattgtttttctccctctctctcaataatattgtttctaagagttcattcaatgtagtgaaaagaaatgaaataaaaagaaattgataaaaaaatttaaattaaaataatacaaaaatataggtctcgtattttttttctcactttgtatatttctctacgtacaaatgaacgaacctaaatgtctttcattcttaactagaactagaagtatttcattttcaactatataagtctattttcttaatttgatattcatttaacaaaaaaagtgaaaggaacatggaccgctgaattaaatatactcattagctaaatcacattaagagccactgcaaaaaaggctaatggaatcacgctcaatactactactttacactctttcgacttttcaaataaatcccatcaatagccagtaagaaacaagcgaaaagtctaacggagtagtatcgtaaaccaattaccaaataaattaaagacctaaagactaaacattgcattgccagtcaactttttatactgtttcattccctccagtggtcctatattccatttcacaaatattttgtgaacataaatataattaagtataatattaattttgtacgttggaataatgtgattctttccggaatccatatctgcggcttctatttatttatattttatacataagaaaattatattattcgagtatagtgtgaccgaaaataaattgacggatgatgacttatcctagttaggtttcagcttttgcatcatttttggctgtatataggatgtgtgcatcgccgactgtactaagtaactttgtaattagttctggtcagggtgtaagcggattgggtggcaaatccgtaaaattcaatttaatctattttttattattattttaaattaaattattggattgcatttattttatttcagtaaatctaattaaaattaaatttgatagtaagttttgaattttagattcaatcatagatcaatctaactcatatgtaattaaattactaatataaaaattttaaattgaacatattttattatttattttaagataatacactattttataaatagtagtttgatcatacatttttttcttgtttattgtatcaatagtataatatttttaataatgatttctaaagatatctttactattttattaaaaaaaacattcttactatttttgggttttgagaatttttttaaatatgacaatttttttatgatctaattcgataattaacctaatccaattaaattaaagttgaattgagttgaaaaaaagaagataaatccaatttaatcaaatccaattgagtttgattggattgaattgaaaaattgattttttatcaatttaacataggtcacttccagtactcttagttgtaggattaaacatgtttttggtttttctttataaaattttaaattataactttggtttttataaaattttaatttattttttgctagtctcttctctatttaattttataaacattttcagtttttgttgataaatgagaagtgtgtttcgtgtcagtatgtttaatagttatatatcactatatagacaccttgcgtgatctagtagtcatgtgatgttcatatctatctattaacagattgtatgatacgaaatcacatggcaattaatgtgatgacgtacggcgcatacaacttattaatttaatctattcttatttgactaattttagtcattttaaatatataatctattcttcagttattttcacattcaactaactaaatcattatataattttttattcttttttataagacattttgaacataatcatatataatcattaacttattatgaataatattaaaatttaagaataatacatattactattaataaaaaaatattaatacttagaatatttaaataaaagtaactagtattagaaaaaaagtattgcttagaaattataaatatcttataaaaaatcatcaattctcctaaatgatgtgttataataaggaatatagaaaatatgtcacatcatagtatcatccataccattattgaaattagtggtgaaggtggaaatgtcaaaatctctattgcattctctctaacgccctatagactatagtaactaatagagttccaatacttcgaactctgattaaacaaccttcacaaactttggaaataaagtcttggagatatatatatatatatatatatatatatatatatatatatatatatggatttctttgttataattaatgagtttcaaacttgatatttttctttaattattacatgatgcatgtcagttatatataataaggcaaagttaagtagagttgttccagacttgaattagagctcaatgtatgttggatatttgagtgtgtgtcttattaaattttattttttcaagtaattgttatacgtaaaatagtaaaaatatgatgaatattttttggcatgtctttacagatatgacgaggagaatttaccagcagtggacatttttgtgtgcacggctgaccccatacttgagcctccatgtatgacgattaacacggtattatcagcaatggcatacaattatcctgcgaataaattgagtgtgtatctctctgacgatggaggctcagagctaacattttatgctctcttaaaggcttccattttctccaaacattggttacctttctgtagaagattcaatgttgaacctaggtcaccagaggttttcttcgctgccccaacttgtagcaataataccactgagtatgtccaagcatggttatttatcaaggtaactgactttttttttttttacgttgaattatcgatggttatatatgtccatatagtgctgtcttcaaatgttactaatattgttcgggcacggtgtgcttgtgatcacatgaaaattcttggagttgaacaattgatgtttttaattcaaaggtttgttatacggaaaggaatgcattagaaaaaaaaacaagtattaaataaattaatgaatgtatatttaacatttgaaaggtaacaattagttaactaattagtgcaggtaatagatatatagatacaatgagctgagcgcatagatcaattgaaataagttattttagtttaatcagatgtcttaaatttgtattttatatgggatctataaaaaaatatatatctaattctcttaaataaaatgttaaatttgagttttatatatgaattcaaaatttcaaaattaggttactgaatatttttaactcaaataagattgtctcatatgtgaaaaatatatatacaatattaacaaaaaaaagtaatttttattaataaatattaattattaatttttgttagtgaaaaaattcaaattcaaattcaatacaaatacgttacttgttatttgtttgttttctatataatcagtttttaaaataaaaagttaaatacatatcttattgttttttctttaatttgttttgcctgattctgtaaatgttactcatttatacgaattaagacataaaaagtgagatttcattctttgatgaaaaatttccccattttccatttcatatatgtcagaaattatacgaagacatgaaaaatgagattgaatcagctgtagcaaggggcaaggttccagataatgtgaggaatcagcacaaaggattctcagaatggaatccaaaaacaacaaaacaggatcaccaacctatcgtgagggtatggacatttttaattttcacaaaagaataagaattcacgttggaattaatctactatcttagttttctatataactaatttttcaatataatctttattcttcattttattagataataattgacggaagagacacaaatgctgtagatgaagacagatttcaactgccaagagtcgtatacatggcacgcgaaaaaagacccaactaccctcaccacttcaaagctggagctgttaatgcactggtgagtaatactcacagcaatacattaacagtgtatgctaattaaactcataaatttatattttacttgtaaaaatgtatttcgttttaatttaaaagaattaaatcttaccttacaatttacaaatgcaagctaacaatatttataaaaaaaagttaattaactctttatctaatatatttttttcacttaaagtgtcttaatactttaattagatattaccctaagctttgcagttaagctaaggttttttttttttttttttttgaaatagttaggctaaagataagaaccttgaaaattaaaccctttttaagtttttttattattatatcttagtatactatgttttccactcactttataaacttgtcttttgtacattgatgatgatattttcaaattgttcattcaaagacgtatttgactatgtttttccaataacaacaaacaaaaaagaaggaaaattctctattattatttggtgttagtgtcacatgtcaaaagtttcattctgcagataagagtgtcatccgagataagcaacgcccctttcattctcaacttggattgtgatatgtactccaataatgcaaatacaattcaagaaatactatgcttcttcttggatgaaacaaaaggccacgatatagcttatgtgcaatttccacagagctataataacatcaccaagaatgaccattatgcaaattcttatcttgtgagcagtaaggtaaataataaaataatgtaattactttatagtttatacagtatacatatatataaactcacacataaggatggaccaacagtatattgagtctgattttcttaatatgtgcatataaagtttgagctagctggcatatgtggatatggagcagccttattttgtggaactgggtgtttacatcgaagagaaagtctatcaggagcttacttgatagattacaaagcaaaacgggacctgaagcctaaaagaaatgataatagaacaattgatgaattgaatgaagcatcgaaggctcttgccacttgcacctatgaggagggaactcaatgggggaaagaggtttgcgctcatgtgtagattttaatttatctcagaaatttcaatatttaataatatatatgaatcttgcagaagggattagtatatggtattcccgtggaagacatagctactggccttgtaatctcatgcaggggttggaaatcgatttattacaacccagaaaggaaggcttttgtgggcatagctccaacaaccttggatgtagcatgtcttcaacatatgaggtggtcagaaggcatgttccaagttttcttctccaagtattgccctttcatttatgggcatgggaagatacactttggtgtacaaatgggatattgcaattaccttttatgggcccctatgtctctgcctactctctgttatgtctttgtttctcctatttgcctacttcatggcattccactgttcccacaggttatctcatgcgtttaattagcttgatttgattgcttaattttcttgcacttatttacctctaattcgtgtttttgcagctttcaagcatatgggtccttccatttgcatatgcatttcttgctacatatggctttagcttgtgtgagtatttgatttgtgggtccacggcaaagggttggtggaacttgcaaagaattaaattcatccataggaccacctcgtatctctttggtttcattgacaccatgaaaaagcaattaggactgtcacagacaaaatttgtcatcacggataaagtggttactaaggatgtccaaaagaggtatgagcaagaggtcattgaatttggaggctcttcaatcatgttaaccatattagctacagtggcattgctaaatctttttggtctcgtttggggaatgaagaggattatgatggatttggaattcagctctagccaattgatgatgcagattacactgagttcattggtcgtaatgatcagtttaccagtgtatgaggcacttttcattcgtagtgataaaggttgcataccatcttcagttatgctcaagtccattgtcttggcttcattagcctgttgcctagcacctttcatttgctaatctagttaaatgtcaaagtacaatactgaaagtgtggttcatacttactagtgataagaatctttcttagttcctagtttggcttcattgacttgaagcttcaagtatgtgcgctaattatctttattagagtactttggtttcatgtatctaaacatacatctagccactattatttgttcatggaaaccggacattgagattcccaatatttgatttacaagaaatactagcaatgcacatttcaatattatatatttgacatactcccttctgttagggaaattcatgagacccacgaattatgtatgtctgcttcttcgtacaatagatattgttttcaaattggtatgattttaggaatttcaactaataaaaaaaatgagtcgaaaaaaggtgttagataatatatatttgggttaattagacatacacttctttatatatttttatactaatatgtttaatttctacattttaagatttacctaattaaatttaacgtccaggcactatatatttggtaataacaattattttttgttacataactatttgtttcattttgttcgtaaaattaatatttaaattattaaatatacttaaaacatgttctaaactaattataataataagttttatattaaacatacggactttttgacgaaaatgagaattttggagaaaggaaatatgcaaacggattcttttaagaagtattttcatgtttcagacattcattcattttccaagtcttagcaaaaaaagtaatttctgcatgtcaattgtatgtaattagaatatatatatatatatatatatattattgaagttatatttataattatgtaaaaagtaatttttatatcgattacaaatataaccgatgaaacatcttttacatcaattatatatataatttatgtaaaaagtaaaaaatgctaatatttgaagacatgatactagcggataagtagtgtctaaaacaaccctattatcattgtaaatacttctaaaaacaatccctttccatatttacttttgtcaaaatctcattctcgttaaaaagtcaaacatatatcactgatgaaatagagaaattcttgcttattctatgagtaaggtatttttcttgttctgtaccatttattatataacatgtaaataatatggatcattattgtcttctatattaatgagtctttttaattcttctaaaatattaaccatagttaattttaatttttctaaataactacactaaagcaaaaattttctcttgaaggtgttatgggtgttgatataaaattcataaaattaaatatattttaaaaaatttatttaaaaaagagaaattgatatattttaaaaaaatcatccaaacaaataaaaaaaattggttgcattttttatttttttagtagtttttgatttttactttagataggtttacatttaaacaccccaaaaaaataagaaaaaacaaaagtataataaagatatttttgtaaccaactcataactatttagtttcaatcatgaatataatattacattgtattatgatgagagaaaaaattacagtataaatctgctattaataatgaacacgtatttattggaaaaggtaaaaggttgcaaaaattatttggggactagtgacgcataatcataagttttatattggaaaattttaatcttccatttaaatatgacgttaaacaagttataaataatgaatttgataaaatttaaatactaatttttgtcaagttaaagttttctatcatcataatacaaagtaagatcatattcatgattgaaactaaatagttatgagttggttacaaaaatatcttttaagttattatacttttattttttcttatttttttggggtgtttaaatgtaaacctatccaaagtaaaaatcaaaaactgctaaaaaaaataaaaatgcaaccaatttttttatttgtttggatgatttttttaaaaatattaatttctcttttttaaataaattttttagaatatatattaattttatgaattttatatcaacaccttcaggaaaattcttgttttagtgtagttatttgaaaaaattaaaattaattatgattaatattttaaaagaattaaaaagactcattaatatagaagataataataacccacattgtttacatattacatagtaaatagtacagagcaagaaaaatatcttggtcatgaaggaagcaagaatttctcaatatgaaataattaattttgatagtaagcggtgggtacaaaatagtaaagatttaaatatattttaaatttataaatagagtttggcggttagctttgtttttagcattcttttttgtttcttggcaatatatatatatatatatcgtggctatatgtgctgtcaatgggttagtcagtacatttgtgatcacccttttagcttagcttggagtgttgtactgtcaatgcaacacccatcacacaatataagaaatatcaatgaataacatattgctccattgcaaaaaatttaaatataagaaaaaaaattaaccgactgcaagtgcaacaagaacactggatagaaaacttgaaggtaatggagagtggtgaagactattcactgtttgagactaggaaagacaaaggaaggcacattcgaaggatctatgcaatctctttgtttgtggccatatgcttcatctgggctttcaggttgagccacatacccgcatatggcaaatgggcttggcttggtttgtttgctgcagagctctggtccggcttctattggctctttggtcaagccctccgctggaacatgctgttcagaaaaaccttcatcaatagactctatgaaaggttcaagttcgatctacacctttaatttgttcccgtgtttaagaaaacatttttttgattttttttttaaaattattaaaattgtttttttttaatttgttacaaatatttgtgtatgttttaatatctagaaaaattagaaattacaagtaattatatattactacccaatccaattacttaggattggagtatttataaatcaaattttaacctgttaacctaaacaatcacttaaattcagttggttgagcattatatatgatgaattattgtaaatttcctctataatgtgtgtgttttaatttgtgatagatatgagagtagcttgccgagagtggacatttttgtcttcacggcagacccaatcattgagccacccatgatggtgattaatacagtgttatctgtgatggcttatgactatccagcagagaagctgagtgtgtatctctcggatgatgcaggctcagacataactttttatgctcttttagaggcttctacctttgccaagcattggatgccattctgcaagagatttaaggtggaaccgaggtcacctgctgcttattttaacacccttgtctcaacaaattcacacgaccataaccatgccaaagacttagatgccatcaaggtgcggagtaatcactttttttttttttttttttttgttcatgtcacttgttgccaatggaaatccctaaatttgatctaaatcttgctattgttatgtacataaggtttgactaaattaatcaagccttttatacaaattaactaattatttaaaatttcaaattgtttggaggtggttgaccttggtttttatttataatgatacccttgttaattagacatatataattttggttataaatgacaatctcattaattcacaacttttttgtaattaagttccatttaagtatctaagttgcatttttttttagaataaaaagttgtataacaagaatatgtcatgagataaattttaaaaaattaaataaattggtttgcatactctaattattttgtgaaggttgcctattttcttctcacaacagtgtgcttttattttgtggtagaaactatacgaagatatgaaaagacgaatagaagatgtagtcaagttgggtggagtacccagcgaagcaagatcaaagcataatgggttttctcaatgggattcgtattcttctcgacatgatcacgatacaatccttcaggtgaattatactttctcaacattttctataagtatatatttgagagaattatatatcgacatgtgtataaaattgttaaacaacttttgttaaaaagatattgtcgttctttacacaagaatgtaagttgtcgtgactcacaggaaaaaaaaaatctgcacagtaactcttagcatacttagctttatttagttaagtttgggagaagttaattagctatataagttagttaaaacttatttgaatacaagactagaagtgtttatgagagtttttctattggaaacctaagtgtccaacttatagcctcattgtatataagcttgtaataactcttctgtaactaacaaatcataatacaattgatcattcaccacttactctcaatttctggtttcttcttcctcaagttattgcttcttcactcttcactttcagttgaacttcatgagtaacaaaactactcgtaaaaggaattacacagaattatattaagaacatatttttcaattaatctatgcaccacattgtttttcaaatttataccatatgaagttcacatttttgtcaataattttgaactcaattcggctcatgagttttgtgttgtcctatatataagtttgatgcatggtttgctcttgtggcttgattttcttaccagatactacttcatgaaaggaactcgcacaattcgaaggatgtagatgggtttgttttgccaactctggtgtatatggctcgtgagaagagacctcaatatcatcacaactacaaagctggagctataaattcattggtagtgtatataattaaaacccgcctctattttttatttaaagaatttaggatgaagaatagtacctcaattcatgttagaaaaatctttcaacttaaaaagtatttataaggaacttaattacatttacttcacctaaaaaattgatcgaatagaagtttaagcctactactgggtatatgtaaaactgtcttaatctactcaatgaatctcttgtggttaaaacatatacagtttcatacgacttaaaaatagcaaacaagtaacatggtgcttattatttattatttacaaaaggaggttcacaaaaaaaataccactgtatatatgagccgtaagtggttgaatcattcttgcgatcttttgcgttatagattatagattatttacattggcacacatcgtcaacgatctaattaatcacccatgtgcatgagtgtgtctatatatgctgcctaattatgtgtgtgagtaactttttatggatcatttgtcaatccatgtggattaaagataacattcttttcattgacctaaatgtagctaagagtctcttcaacgattagcaacgcgaaaatcattctaattatagattgtgacatgtactcaaaccattcacaatcagtgagagatgctctttgttttttcatggacgaagagaaaggccaagaaattgcttttgtgcagtttccacaaaattttgagaacctcagtaagaatgatttgtacgggaatgctatatcagcaattgtggaggtgagttagataatattgatggaatggaatactgtttttccagaaagattaaattcttccatttgcattacccctgtttctatttgatttcatttgtagatagactttggagtataactattatatatatttgtctatttgttttatagatagacttttgagtataactattatatatatatatatatatatatatatatatatatatttcaatttgaaatgtacataattttagtgaaaagaatatatctgttgtgatttctttaatttagacataactaatagctattaataatgtccactaattatttaaatgcttaaatatggttttatttctaataaatatcgattttttgtgtttatttctcaataaatttttgttttacattgagtgtttgataaaataaaatttttaccttttgtcccttacacttattttagtatgataaattagcaaattttatatttgttacctaataatttttatttatttattattagttgagactaaaacgaaatttgttaatttattagggaacaaatataatttttttttaaaattctttaatttaccatagacgaggacaaaaaacaagtgttatttttattagaaattcaacataaaacaaatatttattagaaaacaaacacaaaaataagatatttattaaaaataaaaaacatatttaagtcttatttaaaaataataatttcacatttatcacgaccactatgaaggtggagctccatggtgcggatggttatggtggccctttgtttattggaacttgttgctttcatagaagagacgctctatgtgggaagaagttcaattgtcaatacaaaaatgattgggatgatgagaatgagaaagaggtgattaaagcaaacttgcatgaactagaagtggaatcgaaggcactagcaagctgctcctatgaggaaaatactctatggggaaaagaggttgtttactttgatctttctctctctgttttcaaaatcacaaacacccccaaaagccaataataatattaatagatgagtatatatacattaaagtacaataatgaataatttgaagtgtgtataacttatttctttgtagattggtgcaatatatggatgtcttgtggaggacgtgataacagggttgtggatacattcacaaggatggaaatcaatatattacaacccagcaaggagggctttttttggaatagctccaactaacttgcttcacacactagttcaacagaagagatggggtgaaggcgacttccaaattttgttttctaagtacagtcctacatgctatggtgatggaaagatcaatttaggcctattaatgggatattggcactttaactatttggcaaccacttgtttgccaatactatattactccatcatcccttcactttatctccttaaaggcattcccttgtttccaaaggtaataatgacctccctttttctaagagaatatataagagatttgcaacattttattctctcccaaactccttatcaaatataaatatacattataaattactctaaatttatattattttggagttgtcaatagatatgattctataaattattttttttacatctttcagaatttcatagaattttttttattaaccatttgatttcaaaattgtttttttattccaataaaaaaataatagaaaaataaaatttaacgttaaaccaaatctcaattattttatttactctaaatttaatttaatgttctttttctattattttattttactcattgttaaaccaaatcttatgttaaaaaaaacatttttttgccacttaaattgataagaattagtggcctattagaggccgtttcatttaatcgagttttaaaaggccttagttttttttttctgaaatttttctttgcttgagtcttttttttttaattatatttttttcccgtcaatttctctattttgttcaaagtacaaatttttcctttgatatggactttcatatcttattatcatttttctatcgtcaaatgttaatttagttaaaaatatgtcggcagagattagaaccagcgttctcttccccctctcttttcctttcatctttaaattcttccttctcaattattaggttaaccttaaatctcccttattatcatttgtgtgttagtccttattgaaaaatgtaacagaatagattaatggatttttaatttaagtagtctgtttatttgtaaatattttgatactttaggcttatagtccttttacttatacattcttttatttagttttaattcacgaatgtgagacttgttttctaataattgatatgagtatgaaatcgaaatgaaaaaaacttttcaacgaactaagtaactttccctaaaccatagatatgttacctttgaatgaccatctgataattaggttttactacgtaatatacctagacacatacatgtgtgtgtatatgtataatttttttcttctctaaatgaatcttttgtgttgagaatgcaactaacattttgtgcttaatatgtgggttaaacagatgtctagctcatggttcatacctttcgcatatgtaatactcggggagagttcttctactttgattgagggtttaatttttggaggcacaatccagggttggtggaatggcttgaggatgtggttgtacataagaacaagttcttacctttttgctttaatagacattgtcttgaaattctttggacgttcatattcatcctttgctgtcacaactaagattatagaagatgatgtttcccaacgttacaagaacgaggtcatggagtttggaacctcttctccatttttcactgtactaacaacacttgcattactccatttgttttgcttactagccactttaaaagagttagtcctttgcagagttgctttaactggtgagaaaatggcattgcaagttctattgtgtgggtttttggttctcatcaatttcccaatataccaaggccttttcttaaggaaggacaagggcagattgcctagctctcatactattaaatctactacactggctttaagtgcatgcatcttcttcaaaatatggaattaagtatattaaggtagtctctgcttttaccttttgattggatttttttacaatcacaatgtagtattgttttggtggaatgttagctttcaaatgataaacaatgtacttgtggtgtttttagttggaaaagaaaggaattttattgttttccaatgattttatttttataatttaatggatatgcactgttaatgtatacaaaaaattactttgtcaacaaatcaaaaatcacttttggtatgacttttaaagttgttatagtaagagttaataaatttatcatgtatgattatttgtaatttatgactagatgacatcataaaattgtttgcattattagtgcataattcattttctcttatttttataacatttgtaacagggtattgaagctggtgagagtgattgccaatataaaatggatgagtcatgaacaaggagtgactcttggaagataaaaaagatcattaacaaaaaaaacacatggatgaaatgaatatacattggaattagaaaaatctaaaagttgtgcaactataagactatgtggttaaacatgacttaaatgaattgattaatattacatatattaacaaaatatatattttttgataatttatcatttaagaattttataattaagtatacttgatttggagcaatttttatatgagtaacctttgaaaagttttccatgatacatgtaacaggggtcaaagcatgcaaaaaaaaaattgtgttgattaattgggatattgattaatccggaaagaaattaggcattccaagactatattcttgtcaaaatataatattatatcaaccattttctcaatataaggaagaaacaaagttaagtttttcgtatctcatttcacttatcttaagctagtttagaagcatttaacacccctaagtttgtaaattaccgtctcagttttctagagtctggttatttctagttttatttttttttaaaaactaataattcaaatatttttttttttttatagacaatggcgttaatgaaaattgaaaattcttatattacatttttttactacaaatcatattaataacttaacctttaatttttttgttatgaaacttaatctttcaataaaaaagaatattaaaattttaaaatgttacaacattgttcgttttgtttgttttttcgttaataatctatatgtaagttatgctagtggttaaatcgaacaagtaaatacttgaacaaaggtcccctaatctatatttatattgattgataatgtaaaaaaaatataaaagtacacacacacacatatatatatatataatatgttttaatttttagataattttgaattattataatttattattttatttccaagatcaatattttgtgaaaaattaaaattttaatatttaacaccttgttcatattataatttgaaacaaaaaaaaatattcaagaaagaataacaataaaaaatgcctaactatattattttttaagattaaataaattttgggtcactcaaactattttatactctgatttttattctcttcaaatttatttcagataactaatttcagtccctaaaaaattatgtgttcattttaatttcttgtttatttttaatattcaaaactattccttgagaggatctaaaattgagaagaaaatgcaaaaacttaatctcatgggtcaattttaagcaataaaaataaaaaaaatgactaaaaatagataattttttttttaaaaagaaaataaaactagtcgtctgaaattagataggactgcaaaattttaagaggtactaaaaataaaatttaaaatagtttatggacaaaaaaatataaacaacgtgtaacaagcaaatctctataccagatagcaaaatgcaaggcccaaaagggagcaccttttgccccctaacaataaaccacttttatatatttggataagagtttgttttctttactcttccatctccatgttgcaaactcacataattcatctactaccctcaactcctatacttgagaattcgttggaagaaactagttacttataaacatgttttctgttgaatcttttacacaagagcaaccatgactatgactccgcaggaggaccttgtatgcaacaaaaccattttttctgaaaatcaaatgaacgttattcatgagaggggaaatgtaaatacaaaaaaaaaaaaaaaatcaaacaaattataggttcaacaaattatccctatactacatcaactaactatagagacaaaaattagatagttcattcaacactactagcagacatctagataaaggttcctcaaaccttttgaatgcatattgaatgaactatactaatcatctagatatcgaatgaaccttttagcagacatccagtcatctagatgcaaacatattaattgaatacatattgaatacaaaaatcagactatactaatcctcaataaagagatcaataaaagtatcatatttggttacaacataaaggttgtaattgaatcattgttgccatatgggtctttggatccacctaactttttaatcaaggacaatgttagcatcgtgtgtgtgtgtgtgtatatatatatatatatatatatatatatataggtagctcaggcaatcattctactgtttcttcattcttttgaaacataaatacattattaaccaagaaaagaaaaataagcatgtaaatgcgcgaatatcttacactttgtgttttgcttgaatctaacggaggtcttgtacgaggattattaacctttgcaggtgaatcaggtttgccacctgtctttttctcatttctagctttgttgaaaatcaccgtgtaaccttcagctgaagctggatcattcacatcccattcaccaaactttggtagtggtcgacccgtgtcctgagggttattcagatttgtttgtttaaaatataattaaactgaaaagccttatatgtgaataaacttgatatgttacatacttttttatcctaaaagtcagacaatcaaataagatcatgttaccaaaatcaagaaatggaaaacaagtttaattatatacgtgaccgtagaatgaaacaaaattattgtgaaatatgattcatggatataaggagcaaaattgaaatgaacaagcaacatgaatgagcaatcatagggaacaaattaaatgatcagaagtaattcatagaaatttgagatagtaagagaaaaatgacacacaccgacatgaatacaatgttggaagattttccggcggggggaaaatgagtgaggaaaaggaggagaaaatttagaaagagagagggcgttttaaagaaaatgaaagaattttggcgtttatatatatatgtaacgtgttgaacggaaatcaatgtgcggtggtgtagggagagactaaagaatgtgtgttgaaaaaagtaacgatgtggaatgggaaaggaaggaagaaatcaatgacgacgcatccacatgggcttactattggaaggtggaacgtctcttgaatgtcataaattgatttgattaatgttaacaaaaggttatttatttatataataattaatttggttacgtttataaatggtattttttatataattaattcaattttgattaaaaaatatcaattactattaaaaatgataaattatattacaattaattttattgctttaatggtaacttgcaattaaaattaaagatatattggattaagattttaaattcaatgaataagaaatgatggagtttggataaaaaaaattaaaatcaacataatttttttaatcttttaataactaaattgattataactttatgttctcgtattaattcttattgcaattttctcatttttcacttttggatttgaacaatagatttaagatttaaaattatatatgttgattttcttattttttttaatataattactacaagtacttgatgataaatttaatgacatatttaaatgggataaaagggagtgatgcggatgaaaaacttgtaggagggttactagttatgtgaatgataaaattaagagtgacactcaggaaagcattgcgagcatgtgatggacatagttaggtaagaaaatcatggttaatcttatcacaaaagataaacattaatttagaaagcaaatgaaaaagtgtggaggaaaagagtatgtttgacatttttttattccagaaaaataacataaacatatatgacacacacatcttgaagaatattaaagagagaataatatatgtgtaatgagagaaaagaaagtcagataaccaatagaaaaaaaaagagtctaacaaaatcttaaggatttgggtgagattgttttatactaaaaagtatgataaattctttttaaaaataattcatcaaaaattgtatatttttgaataccaaaagactttttataagttataaacaatcttaattgaataccattggattttgtagcctttattgaaaaatcttaaaagtcttaattgaatatttctatacttatttatacaatttaaaaatcttgattaaataccacaagatttttttattaaaaaaaaatcttttgaaatctcaattcagtacatctctttaattaaaatgggatgtaaaaaagtatataacggaaacatgattccattacgtattttttatgaaataacaatgaaatcatgtttctattgtgtattttttacaccctttcacacaaagaaaatatgattttgttgtgttgtgttatttgtggtaaaaaaatacaaagaatcacaattgtatattgtataatgcaagtgaaaatatataggggcaaaaaaattaattaattgcactttaaataaaaaattatgaaaataatgtagtttccaaagtatatacaaatgtatagcagtcaatcacgtcccaggcagacgtgttcaaacacgtccacacaggacgtgacccagcaccaatcacgtccatacaagaagtgactcaggaggtgacgacacgtgtcattttgagacacgtgtcattttgcggcgcgatgcataaaaacttcggaaggtcataacttttgactggaatgtccgatcgaggcgaaactggtggtcacgcactcaaaatcgagacgagaagccgctagcaagtcgcaaaggagatttgctcaaaatttttcccaaaagaggcctctaagtacctcaaaattgtgattttatcttcgatgacccaaaaaatttcttgttttctatttttcttttattcaattattgaattacatgctattttttatttttctaattacttctcttatttttgagcattttgacataaaatccgcttccatcggacatttctatcaaaatttatgattattcgaagtttatatgcatcaccaattttaccgtataattttgttcaactgttgaaagtagtgttgcgactacaatattgtcattttttaatttgttaaaccgaaatcatttaaaaatctacaatataattttggtaaataaatataccaaaaaaatagtagggtgtgataggaatgtccgttggaggcggattttgtgtcagaatgctcgaaaataagagaagtaattagacaaataaaaaatatcatgcaattcaataattgaataaaaaaaattagaaaacaagaaatttttttgtcatcgaagataaaatcgcaattttgaggcacctagaggcctcttttgggaataaattttgagcaagttttcgagcgcgtggccaccagtttcgcctcgatcgaacattccagtcaaaagttatgaccttccgaagtttttatgcatcgcgcctcaaaatgacacgtatcgccacctcttaagtcacgtcctgtatggatgtgattggtgctgggtcatgtcctgtgtggacgtgtttgaacacgtctgcttgggacgtgattaactgctatacatttataatactttggaaactatactatttttgtaattttttatttaaattgcaattaattaatttttttgccaaaatataggtttaaatatgttttttatttctaatatatatcctaattttgtcttttattcctgataaattttatcttcgaatatgtattttttttttcttttgtaacttaagtgataatgttatcagttatctaaaataaaacttttaaatataaaaaataatatgaaattttttattaggaatcaaatacagataaatattaagaataaaaaatatatttaaactaatatatatacaatagaattatgcatataatatacgacgaaattttattttcgtgaatatagaaattttggaaataaaaaagaaattactcacgtgtagtttaaatagtactgtgattatgacagtgaaaataatattttccctctaaattgattttaaaatcaatttagctattgtgacaagcagtggtttctttttctccaacccagttaaacattcactagatagctcctttgcagctcgtttagtactagatttgtagaatgaaattccaggaagtaattctctgtggctctatccccaattacgtgacattcaaattcaatgaaaaatgaagaggctgcttatgagttgcggctattctattctgtctctccaattcatcatgctttgaaatcaagcatttaccttcagtgagatactgcatttccagaacagacattttgattactctccacagaaaagatttatatgagattgtcagcaagttctatttcaccaggaactttggaaggatgatgaattgatgacattaaaataagcaaagatacgagaagattaaactgtaaagttccgaatggaatgtccaagcttctaagatttctccaacttaatacatattctgatgcagctttaagaaattcctttaagtgtaatgttcagcagctgtttacagggaatgctgtttatactgttatgctgctaattacagtttgtttataacgattagaggaatggaaaatctaggaccttgaattttagagttaatagctgatcttagtccgtaattgttgaagttgcacagcaaaggctggttatgaatgcaagttagaagcgatatgctattgtgggaaaaatattctgttaaggtttaaaaaacatgtttactttcgtttaattggccgagtccttactttcgtttttgtcttggcttttttagtatatgatagtaaacagtaatgtaatcttcaagcgatttgtttctggttactttgggccttcctgcgtagtttatataatgtaagtgatatctaaattattagaaattagttctaagttactgaaagcaataaatcaattgttcccgtgaacccagttgtaatactactcaattgaatactagattggacatttaatcatctgattagcttctaatgtatttttttataaaaaaaaattaccgtaaagttttctatagtgaatagtatattaacaccttttctgctgaaaagtgttatttttataattgaaagtcaatgaaattaatgtttctatgcataaatatcactaaaatggatttttttatctttttctcaacaaagtcttttttaaatacacaattagggaatcaaatgtctatcaatatgcttatggaacataggtatctactaactgggttggatcttcttggtcatattaacaccttagagaaatggtatcaatgcttgtcatcagttgttccatagaagatgaagataagcataaagcaacagttaaccgtggttgcatatacatgtacatttggcttctccgaactatgcgttgtcatgcataggctataactagataagcaagattctaattgttgtgcatgtctacaacgtgtcatgtaaactgttatcctctctgctcagaagtcacaagtaataacaaacaagcctacacagacaaacaccctggtccctgacattaatttcaaacgcaaaacagcaaggcaggtccataaggggtggtttggtaatagataaagggtttcattatattttatgattttttttaattcagagatcatgggtgattctcaatctactagattataaactaattctattcgtgatacatgattgtgacttgatccaaagaattttaatagggtgtaaaccgaacatgaattctcttattaaataaatttttttcatacatataaacgcaactaagtcttacattattatgtccatcatttgaattattaaattttatgaatttattagaatgttctgacaatgcaaatttttatataatattatttattacatattattatatattgtaagtatatacatgaaattatttttaattagttacctatctaaaaatctaaagagggttattgcatgaaaattaaactcattttatttgcgtgcagaatgctacctaagatcttattcaacgaagtagttccttggctctagccaatttaactaaaataattcgcggctcaaacgcaacacgacacatttctggtcgaacactacaaaccttctccaggtctctgatattttggcacaaaacttcactgtctcaaattaaacctttcggctttcatgtgttcaatcgatttaccatggtaatttcttgttatctactgagtaattattttagtgggtcctcctggggttcagatgacacatgccagcgtaaaatttactatatgtactaatttattcttaagaaaatatatgagaaactgaaatttacgtatgctgatcatgaaaactgtatcctacaaagctgtacataacttcttgctttttttttttttttaatacttaaagcatgtacgtaacttatataaagtgcaatttccacgcacttactaattacgtgtgtatctttaacttaatttttagggtgaatcttggccctatgttatctctgagccaagagttacaaagattaactccttgtcatagatattaagagattaattaacttttcttaacaaatatttttttttatacacatgcatattttaagtaattatcacatatttaaatgataaagttatttgttagttatgtcacactatgatgatgtattttactcaccaaactaacaacaaaatggtaataacttatggtatcaaaattgaagtcagttaatcttttaaagcatattctaaattctaatgagttggcttaattattgttcttcatactttagtttttacttgagtttggaactgttttgttatattttaggtcaaaattcttgaaattatgtcttatcatatcttattccttaatcctagggataaagtatgataagatataatcaagatatgattgagatttgttatagatgttcaagatatgataatatataataagatataagatgataagataaaataaaatgtttgatcttttagttatttagtgtcaaaatataactatttataatttgcctacttgtaaagataattttaattgaacatgttatttttatcgattttttagactattttgatatatatatcacagtttttttaaaagaaatatggttgtcggttattttatatatgaaaggaagaaaaaatagattattcaaatttgtgcctgattaataaaataaattgtgaatgatttctaagagaattatttaataaaactgaaaaaaaattaagattaacatgatacacaaaaagggttatcttcatgcaattattattatttttttaaagaaaattgaacctaatcaactagccatcattcttaattaattacttagctaatgatatgtttgaatacacaattctacatttattagaccaaatccctgaacagcagactagctaatatatatgcctatgtggtttagctagcctgttcagagattggtctaacaaatgtagagatgtgtacttagcatatcattaactaagtaattatatatatatatatatatatatatatatattatattataccgtacgatcggttaaattcaatgagcttgatgttatataagaacagctatcttccatggtgtgacatattcagctttcatagagtttttatttgatacgtttttctctcctcattctagagccttcatcttgttcaggtggcaaaaaatgtcttcatcttccctctccataactccattaatcttcgattcaaatgcttttgcattctcatatcgatccctttctttcctctgttggccctttatattcttacggtccctcaattagatcttccatattattaatttgttctttaattcctatatatatcaaggatcatgcataggtgtacagaaggagagaagctttaattggtgaggctgatttgggaagaagaaagacaaggatcagtatatatggaggtgaattattcatgcttaattgttaactcccgttgatgagatatacagcatcatgtactaataatctttgtgcacatcaccccccacaccccatctcatttctaaagaatatagtatatatacaagtacactagctcattcaataatatatttctaatcagcatcatagatatctatttcttacattaagagaagcctagctacatgtcccccctcctaatatatccttttgcaaatataagacctaagatctaaaatcgattgatattttgaaggatttaatatatagatgacagcatatataaaagtaaaacatgaattaaattttagagatcaagtaattttctgaaaaactcactgccacttgattgtgatctacatattcttgaagttatttagtattattttctcagttttagggctattatttcccaggattagggctagggccattttctcagttttagtattatttcaaacttgactaattatgtgttaaaaggaattagtttcacatcttaactaaaagttgtagagatatataaaagaagacgaagatttaagtaaaattaattttgtttagatataaactacataattaacatatgattggtagaaaaacatgtctctttcgtttgtacgtatacacatgaattcaatatcaatatatatatatatatatatatatatatatatgtacacatatatataagttaatatcttaaataaattttaatacttcaaaatattagtcttggattttcagttagaggatacttaagatttgtaataaaacttacttgatgtaatttaattaattataaatataatatacatatttagaccaagaatagagtagggaaaaggaaaggaatagaaatatgcttgttttgatacacgaaaggtccacatgccatataattattatatatgtatggtctgattcaaatgcatgcatgatggtgttattgttcataatggacagggtgatcttgatcacgagtggaaatgcatgtcttgaagggttctattggtggttaggaatggactgtgatgagtgatgtgagatatctcatgttgacagaagagagagagcacaacccgggaatggctaaaggagtctttgcctttgttgggagtgtgctctctcttcctctgtcatcatcacattcacatgcctttgctttctagccaaactagacgtgtacatgcagcgtactgccttataccatttaaggtatgtgaagcttttctttgcctcaggttggattggttataaataatgtcgttttcaaaaatattgaaatggtatgtcaaatacgatggacatgagaatggataaattgtaatgttccttgacatcactgtaatacatgcatgatgtttttcttcaaaaaataaaataaatcagaattcaaattaaagaaaagggaaataaaagtggataagaaactctattttatattcgttgaattttaccataattatagtaaaaataatatcaagaatattcttagagttcaatggtaatctactaatagggataaaaataaaataggttatactagattttatataaataattaagtctgacctttttaaaagtttaatctatcttattagtctatttaaaagtatactaacaagataaattttaaataagctaacaaacctatatttaaatatgtcgagttaaacatataattgctattaaaacttagtttttaaaacagacaaaaaaagaaaacgaatgtaacatacaatagaaaaagtactaacataaaaggctaacttaaaagacatatgataaagaaaaaaagctaatctaaaaacatgggaaactaatgtagaacgataaaagccatatgattcaacaaggccgtgaaactattagtaacttacagattatattgtcagtcatagcctaattattatttattttgatatattaaataatatgacctttggttttattgatttatttaattaataatgttattattagtattatatatatatatattatagataaatagacaaggcctaataattattttttacaagcctaactttagcctatttaagtaaataggtctttttaaaagtacaagtctaacatttttattaattattaagtaagtcaggtcaagtcatattctcactcacaactgtaaaataattttacattaattatataatcataaattatcatatatgataattatgttgacttttataataaatatattaaaattcatataaaaaataattttttattagatataaaattaatttacactattcatacatcacccttaatctcatatttgtattggttgatatagtaataatgtaaaaaaaaatttacattaatattatatatatatatatatatatatattaaactcaattttcataacatatagaactgtcctacataaaagtcataactgataattgattttaaactatactactatatacgtattccatgaattgtagttttctgctgttaaaatttgggagaaaatggtgaccaaagaacatttctcaatacaaaatgcagagttcaagatagaaataaataatgcctcagcggcttcccctttcctttcctagttatttccaagaacaatttttgtaatggggaaaaattaggaacacattcagtaataaaaaattgtttacttactcattttcctttgtcaatacactgataatttgttgcgaatcgtctgagagaaatgattgtgatgatttgtgaatatatacgcgcggtggcatgatgaaaatgtgagaatccaaatcatcaaccaacaaaggagccattttctttttgggatacaagagccaatttggattctacaattaattaaggcgaatatttgtcaaaatattattttattggaacctttttatatttagttggtctgcgggaatttaatggcatgctgatatttcatatttcagctagctcagctcagaaaatgacctcttactttcgatcttttcatttctttttgttttggtggtgttgcttcttgtcaaatttctagttttgtatataacacgcttttaatgagcacgcttatgcaccaccataatgggtaggaaaaccagtacatagttacatacatggatataaaactaaagcagacagtggcttttgtctcttgattaaatgattcaaggttttaaatcttaattaattttaaagtttgaaataaattgtttgtgttaaaaaaaaaaaatattcactattatatattttggatatgaaagattaagatatacacaggtgcaaatagaacgtgagttagaagattaagttgtacatgagctaataggatgtgacagcatttacatttggttgttccaaattatataaacgcattggcatgcatattggacaataaccgaaatgagtaagatatcgattgttacggcatgtctacaacgtgtcaagggaaatttgctttcctcacaagtcacaaagttagaacaaatgaagcctacagagcaaaaatcaaactgaaacgccaaaactgcatggcattgccaggtccacagcggtgacgatggttcttgttgggagagttttaacttattactaggagtgtggatccggtgttttacgtgacagaaaaggggaaaaagaagaaaagaaaagagaaaaagcaaaatgttaaaaaatgaaaaaaaaaagaaggtaaaactgtcaacttatgacatatgatgacaatagtataatttttatatagatatagattaaaattatatttgaatatttaacaaaatatttaagttagtttgtaattttttttattagttgaaaaatttgtttgattttttgataaacaaatttttataagtagtttctaatatttttttaaaattattttaagtaatatttttaaaagatctagcttataattttttatatttttatttttaatatatttatctaatttcttaattataatttttaaataaattataattttattattttttattatttaacacttttcaactaattcattagttaattttatcgaatacttaaaatttagtaacctaatttttcagtttgtgattacagttaattttcagctaattttgaattttgttaaacataacctaaagttgaaaactcattagaaaaatcaacatttgaattaattttgtaactatggaagtatgtttgcacaaaatagccaagcaaaatgcgagaaggacaacggatacaattgagcgtttctacagaggtacatcgaaacttgtaattgtgacagcgaagaacagtagcaattcaaattatattcatatgtataaactgacaaaaaaattattgtaacgtcagtctgccacctactaaatcaatttcttttagaggtgagaaagagaaatgtatataaaaaaaatagtgaagctttttaaagaaactaaaggagttaataaagagattcattccatggggagaaattcaaagtagcacccttaattgctttgtttttttttgctgggtacaatcttaattgcttaatacatagtttttattttactttctccttttaaaaaatacatagttttattttcttgttattactaattctaacatctttagccttcaaccctttttgatggtttgttcaattaccatgactttccgttccttgagactggtataaacttgtggtcaaaagccttttgcttctgcttcttggacacaacgttaacatgggtgtgatatcatgacattaggctttatattgaagtcccttataaaatgatccgttcttgcatctgatacttgttgaacttgaacaaggtctttaattgcttcaggcataggttggtcattcatcattttcttccaataatcccccaggtcttttcttgcatggcttaagttgatgttggcaacctattagtagagataacattgaaaagtcataaaccatgcatctcatgacaaactcaatgtttcaaatttatgagttgcttcagaaaagcttaccaggagaagagacaagattgcgaacaacgcagagattggcttcatttctttgctaagatcgatgtgtgctcctccttatagcatgattaagattaattatgctctagctaccttcacaacataacatttttcttttagtacttgtcatccgagactaaaacggactaaaaatgtatatgtaggaaataagttaaaaagtatacgtgcaatgattaaaatataaagattgtgcaaatatatggaataaatgagtaattaaataaaaatagagtagattacagttaaactccctacttcaggttttggtgagattgtacaaactcccctcttttggaacgtttacatcaatccttgattgggatgatgtacatgtaatgtttttgaaagtgtaacttttacaatggtatgcaaggctttaacatgctctttgcctctttcccctacttctccgtgagtatctattgcgatttacttttgtttcagtgaagaaaacaattccatattatttgtattgaaaattaagttgtctggcaaattataccattaagtttgacacagaatgagaccaaggcccgtattattaataggggctctgattaaaaattctgaaatgaaacattacagcatgattgctaattattgctgaagtcataagcctttgaacaaaacccgatcagcctaatcctacttggtagtagtagtaatatacaaacatctatgtcaattttctactttcctcattctgtacaaacaccatgagaatgagagcacctaaaacacggttttacttattagaactatgaccaaaacaaaacaacaaaataagcttcgtctattgcgctttgaacatacatagcttattagccacatgaaattcagtgtattagctctgtgaatgaactatcactatgtaggatatgactcgttagtttttgagactacagaatagcagagtatagcattagaaatgatcaccggaaacaattaaagaatgaaaagaataagttgagttgatcagtcaattttgatctcgcacatagagtcttgatcagcctctgaaacaatgtcctcaatagtgagaggcagaggtaggtcagaagagaaggtgagtgttggcttcacttttggcacaacaagtggtgcagcctcattgtttagaatttgcagcactctcctcatggaaggtctctcagcactatcaggattagcacaactcaaccccaaaagcaacaatttcctcatctcttcctcctcaaactccccattcaaccttttatcagctgcctcaatcacttttccttcagagtgaagcccccaaacccaatcaatcagattcaacatcttagacccttctctttcaattggcctcctcccacaagccacctcaagcacaaccaccccatagctgaaaacgtcagtcttatcagtggcttttccatactgaagatactcaggtgcaaggtaccccattgttccagcagttaaagtggacacagggctcttatcatgatccataagctttgccaatccaaaatcccctaatctagggttgaagtttccatccagcaatatgttcccagccttaatatccctatgaatcactctctgctcacactcttggtgaaggtaaaccagcacagaagccaaccctagtgcaatgttttgcctgtgagaccaactcaaaagcttccccctttcaggttccttgtaaagcatcttgtccaagcttccattgggcatgaagtcatacacaagcagcaactcccccttctcaacgcaccaaccttgaagttgaaccaaattcttgtgcctcaaaccagcaatggtgttgagttcagccagaaactcagtcttcccttcgtgagaatgtcttgaccttttcacagcagcgatggttccagaagatataaagaaagccttaaacactgttccgaaagatccatgcccaacaatcctactaggatgaaactctcttgtagcagacttcaactctttgtaatgaaactccctaggataagccacgaaaccactcttctgaaacttgtctttctgtctatcttttctcccaccattcttccatctccgaacaaaaacgaaccccaagaatattgtgaaagccacaaagaaagaaacagaacccgcaacaatgccaacaaccctcttgtcacgcttcttcgtggcaccagaacgtgaaattcccaccacggaaacattatgagggtggtgcaacgtggtggtgattgtttctgtgtgaaaggtccaatttttgatatggtgaagctcggtgcttccctgagtggaagcggagaagccaacatagacggggtctctgaggtaatgagaaagatcgaacttgacagagaggaggggtaggaggggttttgaagaacgtgaatagctcaagaaaacgttcagtaatgtgtattgggtgttgtagtctatccatgcagcgatggtgttgccgctcttgaggtcgatgccctcaaagatggggtctccggttacgagggacttcaaggagtccacgtcgaagcccacgtggttctcgttcgggtcgtcaaagcgcgcgtcgaggcgcgtgtcgaattcgacggcgacgaagctggcggaggttgggaggccgagagggccagagagggtggtgttgggggagaggaagaaggcgaggccgtcgccggaggaggtggggttgaggttgttgatggagaaggagaaggtggtggagaaggaggcgtggaagagggagataggttggctgtagacgacggcgccggtgctggaggtgggggcggcgttggtgagtcttacggcgccgttgtttctgagagaggaatcgccgaggagggtgatgttgttgagagtgaaagaaggaaagtcgaagctcacgttgtctgctactgccacctcccacgagaacaacaataacaacgtcaagatgaagaagaagaaagtgaaatccatggccatgaactacgtggctccaagaatcaacaagaaaatgaatggagaagagaagtggatgttgtgtgtactgcatgtggaggctaggtatctttattttgcatttttttagcactatgtctatgtgcattatcaacttagttttttatcctaaaaaaaattgactttataatattaaggtatacgctattatcatctcttcagtgaacgatatacattattcataaagacattttccataataacaatcatacatcaaccaaagtagtcattgtaatatgaatgaatgaggtagacttgaattaaaaaataatcgacacttaaatgagagaaactattgtcaaaaattttactttgtaattaaggtgtataatatatgaaattagtgataaatatactttaaaatgcaatgtcacatgaagaaaaagaatatattatataataatgatgaaaatgcagtattatataatgaatatatagtgaaaatagttttaaaattaaggtttaatgatatgatgaaaataagattaacaaacatagctattagataaatgtttatcatcttttatttcatttcttgtttaccattttgattcttaaatgatattttattaaaaatatatatgtattttggaagtatatctcccaaactatggattagagttccaaaaatatatttctgaaataaatatatgtaattctgaaaagtaaaagggatgtacatctttaagaaaaagggtataatgaataattgagaggaggggtacaggggtgtacttggataaaatgagtgtaaatagcaagagcctaaagttcctagtattgttgggccacctttttgaatggaccctttcaatgttgcgtgaagtatggtatgggcatggagtattggaatttgacgtcttcgtgttcaacgcactggttctcatcaagtgtatataactatatatttgtatgtgtagtattcttttcatttcattcatcgtcttatttggcactccccatcctcggcttctgcttctgcttcgtggagcaccctcaatccgtcacccaacacacccatgtaaggttctcttttctgtaatttaattcactacaatgtctttttagaatcacagcagaaattaaaaatttgtctgaaacctgtttatgctttttgttggcaaataataggtactaatttggaatttattagaaaggaagacatggttgggattcatgtttgtaatttgagcttgaaactctatctcttcgtgcttaacttatttggagcttgtaactggaattccaagttcaattaatccatcaaggaaaaaaaacaagttattttgcatttggatttcagcattgcttgtttttaatggtttcaggtcatggatgttccattgccactggataaattggctttagatttgattaataatgaaccctcccctgcaaacacgagcaagtatgttcctgtctgtattatttatttatttatttattttgtgagggacttttcttttgaccttattattaattaattatgacattctttttctgtctctcattaaaacagcagcaagatatatgtaattctggtagcaactggaagctttaatccacctactttcatgcatttacgcatgtttggtcagttgcgtttccttaagtttacagtgcagagacttgttattctactgccctgagacatctatacttttttggtgcttataaaactcaaatctgaataattttaactccttcccctcctctaacaaaaataaatgacatcttgaatataagttcattcttgaaggtattgattattgaacaatttgacacttttctatttttccattcagtgtagaagaattaaggggaaaaaaattaagatctcatatacatcatgtgaaaaaaaataaaagtcaatggttgctcaatagtgtagtagccaaaactgcatgcatgataatcactttaccatttacagtggttttttgcattttgtgatcaaaccatatgttaacaattgttaaaatatactcactataaattatataataatataggcttctttgtctacttgaattaatattataattataaaatccatatacatataattgaatttgttattgaaaattctatgctgtacttactacatagatgttcaaaagagttgggtttgcctgggaacaattcataccagtgtatcttcttgtattgttagcttccttgagtcatgatctctgagtttctactttcttaatgaaggtgaatgggagtatatgttgaatattccctctaattcacttacttcttgatggaatttcattaacttaatttcttgaattatgtgcaatttaatttttaatttcatttattctctgctagtctgatttttttaaaataaaatttgtgggtgttacccttagagcttgcaagagatgcgttgaattcagatggctactgcgtaattggaggttacttgtctcctgtgaatgatgcatacaagaaaaaggtatgaagttgtcaagcaaagagagaaaaagattcttcatttattatatccatacatgcgagtctgtaaaacttgctagcaaaataaatgaataaataaggtaaatcatatgcttggcatgtggaaaacactgaaacacttgactgagtttttattttacttttttcagcaaatagatcaaatatgattctatgaatgaaattatgatttttattaatcaagtgatgctattagtttcactgccacatgttggtctaattgtattttgcttgcttgcatgtttatatagggcctaatatctgctgaacatcgaatacaattatgtcatttagcctgcaaaagttcagattttataatggttgattcatgggaggtaattactctttctatcagctaaattgcatgtcttcctattttctgtgcatgttaataagtttcattatccatagatttgaatttgagagacaatgctttgatgtcatgcgtgttgtgagaaatatttggctctctagctaacctgatttattaatattttgcatttttatccggctataaactgctgcaggcaagtcagagcacatatcaacgcactttaactgttctctccagagtccagaattcagtttgtgagacagggttggtatctagaggtatgctcaacaaacaagccttcaatgaaatcacattactctaattgccatttcaaattgctcccctgccccatcttaaaattcaaaataaaggaagaagtgacactgacaccagctgtcttaatctcttttaagaatgaaatactagtcacattaatggtaatccgtactgctgctgaactttttaaaaaaatgtggtgctaagtgttaggaatactttgtgatttaaatgattaatatatggattttaatgtttggacatgttttcctgtctctggcattaggtggtcatttgactctagtattttgtgggaatttcttagtgctatatggatgcatgattggatgggcaatttggttccatatggtgctaaagccttcaaaagttatctattatctatcttttatatatatatatatatatatatatatatatatatgttcattgacttaaatgtgttttagtgtaaaaggagcattaatagttccctcccttcattaattaaaaatgccgtgctagattttcatttctttctatgcatgtttttgacaatgttgtaacaatgcaataattttcttttgtattgatttgtgtagaatccctcaaggtcattcttctctgtggttctgatctccttcattcttttagcattcctggattctggattcctgaccaggtactataacggaaaaatcgaatattatttatcatagattagtttcacatggagttatttaatgattcttggaacaaaataccttgtcccacctaataaatttgataaaccaaccttaaatggttgtggaattcaaagtcagaggaattatgttgattttgtgtttttattgttagaattaacaagcttattgagtcaattattcttatttcttaccacatagatacaaggcatgggtggagtatagattaggagtgtcaaactaatgaattgcataatttttttgaattgaatccatttatggtccattaattatgtattacaaaaatttaattcatccataacttatttcattaaaaaaaggtccatccattatattttatttttttcaaaacaatatttttctaaaacaaagtttaatatttgtacacattcttacacccaaataccatagaatccaatatttgtctcataaagacctatgtccaagtaatgaacttggaactacttgattcactggattgcaaaatatgttggatggttcattatctatccaataacaaattggtaatccaattcaactaatgtattaagttttatttttataattgaatagattgattggttgatttatacttgatggattggacggttagtggataaaacgattgaattgccacatatgttaatgaatactaatttgccataggttgtggaaacaatgaactataattttgtttttgtacttaaggttaaaactatatgcaaagattatggagtagcctgcattcgcagggaaggacaagatgttgagaagactatatctaaagatgaaattctgaatgagaataaggtatctcacatttcaagcttgtcctatttccccatatgcgtttaaaatgaagtgttgcttatggacattttcaaatatctgtttactgtgtatttgtattttaccgaattaaggtcaaattatagaccaacttatgaaatccttctgtgatgtcccatatacttaggtgtgttgatgttcgatcaacacgggaattttaaatttaatgattaaaatttattatctttttgtttgtacatgtatgtgctagcgcacatcgttttttgttgctgtgattggttagaattgattaattcctctcaaccttgattactgattagctgttaaccttggacactttttcttgaggtgtcggagtgtgagacatgtgctgcagtaacacccaccttcttgacattttgttagacatgtgtcggatactacttaataagtgtatactggaccttgctgtatgacttggatacttgaaccatgataccttcaaagtatggatggatacttcaaggacactagtactatataaactataatatatatatatatatatatatatattcaaatattcagttatgaaacaaaattcctgggaccagagtttgtattagcgttttgttatgtaatgaacaataagaattagaatgcattgctttgctactcagcttttatacatatttaaattttccactatttttttaggataatatcaaagttgtgaatgaacttgttccaaatcaaatcagctcaaccagagtaaggtaatgctatgacattgtttactttcaagagttacaggacgataatttttaaaaaagagagacgttcaattttcttgtctttttcactaatctcagggattgcattgcaagaggactatctataaaataccttactgcggatgaagtgattgattatatcagggagcaacaattatacttgaacttaaatgataaatgattactactgtttttcattacattctgtagacatgggtctttgcaagagccactgcgcatcgctatctgagccaattttctataaacagatgatttttcatttttgtgttgtaaatttgctgataaataaatatcacataatttatgtaatcgaattgcaaatactactgttgaagttgctcattttaacttttttggataacaagtgagtgaaaaagtcttgcaatatagataggaattgataaattgagcaatacttaaagtgcgaagaacacttatacctaatgcctttaagactgagttagatgtagtatgttaagtttatttgttaacggttgatggggatctctgcaatatgtttgttctaaaaaaataaaaattgagccagggatattcttgattgaagccctgatttattgaaatttattcaagtagttggttgttctcaatagaaaatttgttagtataggcttaaactagtttttatcccgtggtgatgttataaggtagtaaaatttagtgtcattgttggttttaaggtagtaaaatttattaaataatgaagtgtcaacacagatttgatgttaatttaaaaaaaattaaactctagctaaataatattatataatcaattactgagcacactatattttacattcagtcaacttgatataggggcacgaaaaagagaccccatacttaatatattaattgttccatacattttaagacaactttaaatatgacaaaacaacacacgttttttttaacacaataacagaaaagctaaaaacaaaatgtataaaagagcatgttgtagcacgcctcctatatattgaaccacactaaatgcatttcttggatcgttgttgtacttctgccacgattaaagtaagcaacatgatgatcatagcaaacattggcactgctactagaaccaccaccaccacttgacacatcaccataaaacccacccatcattgttcccattgttgggtttcgaactattggagggatcactgggaaaacaccaacaaaaaaattttcttgcggcacagcataatttatatttgcaatagttggcagtgtagaaagggacgccgcacgatgtgggactccttatcaatatcatcaccttcatcactcttatagggagtattaatttaaaaatttaagagaatctcagtgtaatatgtttttaaacataaaacaaagtgttagtgtattaatttcaaatttaaaaagaatttgtacaagcaaataaaaactatatttaattatgtgtaatgataaaaatccagaaagtaatttgatcgtacatgactaatacaatttgtgataatcatattataataagaaagtcttagtcatgtatgtggagtgaaaacaggccagctcatgcccaatgagttagcactccggattgtctaagaaatattattcttttttctatttttcttttttaatttgaggacgttattcatctctcgctagttgccatatatatttataattctgaatttcagatgatagatttctttataaacaatcttgaaaactctttttatccaaccttgaaacgatgaaatctctcttgtgcacagtgcactgaagtctgcaaagtatttttttttttttttaagtctttaaaaagtatttcgataggcactttttcctctaaaagtatgacttgttattagttacaccaaccccatatgctcattgaaaggcatttataattcaaatatgcataattaaaaatctatccttaatattaacttgggggtatagcgttgccaaagatatacagtgatatatatagttttaaagcttacaaattacatatacgaatatgatgatcgatcgatctacatgaaattaacaacccttcatacttcaaactctgaacgtgaaacaccccttaagtcaagtcgaaacttgcgagttgtgaggcacgtattattgcactgtagacttatggtttaaatttaatttgacaatcaactttctgcctttcgaaaaagggaaaatcaaaatcttgttcatactgttgactacatccccacccagcattcaacaatatatgcgcaatcatatcctacctaagaatccccgtgtattccaattgtactatcaattataaagtattaaatagggagacatattaattttacaaactatactcactataatagtataattgaggtgatataaatttgatcgtacagtacggatgaattaattaatgatcacttaaagtaaactttttctagaaacacatgacaatttatggcatgtccgttgagaactcacacgagagctgcgcattccatggcctatatgcttgtggtcagatagttataatgaataatgacatattaacactttatgatttcaaagatttaattaatattcatttttctgttttatttctctttagcatcatatcacttataatacatatttatataaatttttttttatccatacgaattaaaaacataaaatttataataatttatgcattttagtcaaccaagtgagttaactcttttaacctatgtttatataatttcattttattttttagctatcagttagaatttgatgtttgcccaatatcatttttttgcattataaattgcaaccttgtaccaccacttcccaacttccattgattagttctaccccctatcctatgctttgaaactttagccttttgaatccctagctataattctatagttaaatcttcttgtgaagcttaacattcagttgagccaatgtcaatcttaccaagttcaggggaccgattgtgtgagggtgattttgagattctccctgccacaaatgatgcccatggaggagtcattgtagatttggagaagccaatggactctgaaattttcgttactctgcttagaacatcactttcaaaatggaagaaacaggtaacgatatcaatgcatacttcattaagattaaggtattcaacttcattaagattatggttcataaaataagatattaattcacgtgaaaattaagtgtaattactcgtcttgtaagtgtacaatttttcgttgtttataaaattcttaagcttcactgatccttaatttctttcaaccctttgtttggataagtcatctacagatcctgcgataggcttgagtgcatgttttcgcttcccgtgaaagccttagcctccagcaccgattgcttcagaatcacgtcactcagcaaattttatactaaccctgattttatataaaaataataattacttaattcatcatgacaaataaaaatagttagattaattgttttgtcataaattttaattttatttcaaaattatttataacattaaataatttaaaatatgattattttaaaataaaaaaatttcaatcaataaatgtgtcttattttgttgatataactcaattaaatacacacttttatggaaaaaagaaagtaatcattaaaaataaaaaataaatttaacaataaattaaagtagtctttatatctgttataattaagataaaaaaatattatcttttgttttatatatatatatatatatatatatagagagagagagagagagagagagagagagagagagaacatcataggtagtaatcgaggctagagataatgggagagacgagtgaatgaggaaaccacgtgtgaaaccatgaattattttatcattttttagatgctccatatatttgcaatcagaaacaagatgttatataatcaatattaggcttttcaatctcatcattttatttttcttcgattttgaaaaacagatcatgtaatatctgcatactataatcagcttactaagaaagactagttcagccggaaaatgtgaacaacttttaattcaagatagtatcaacatttatgaatttgaaaaaagtatactatccaaatgatttgtaaagaaaccataacattaatcctactatcttatcaattataatatacgttgcaggcaaaatgcggtgtttggatcaagttacctacagcattagttaatcttgttgaaactgcagttaaggtaatgtttcctgtttgtgtcagattttaattactttaaccttgtacaaggataaggtatatctattcagctacataagattgttttaattaaattatctaatttttaaatccagatggaaatgtttgtcagattctaatttcttttcttaaaaaaaaagtatatttttagaatgtgaatttggatctaactcaacctcaaaagctagttcaataagattaaattcttagaatatgagtttgagtctaactcaatcccaaaaactagcttaaaaaattaggattgttctcccttatatactctattttaattttatctttagtcgatatgagacttgattttttttcaatatatatatatatatatatatatatatatgcatatgagtttaatttaaacttgatcatgttagttttcactattaaataggaaattattggaaatttaatttaataatattattcagttttttcaattatttaatttaatttttgtaatttatattaaactgattcagttcatcatgaatactatcagtatcagaagacaattttatcgtgaaatcacaatggaaatgatcgaatggatgggatcgagctagagaaactattttcaatataaatgttatctcatttttgtcagatatataaatttttcaatgaatatatatgttggtggcatgatgcaggagggtttccggtaccaccatgctgaaccgaactatctaatgctagtttattggattattcctgaaacaagctgcacaatccctcccaatgcatcccaccgtgcgtgtaaggatcggtggtcttgtcttaaatgataacaaagaggttcgttcaaaatataacaacaatatataatatatggttgcctccttataattgattccttgtttgctttcaactagtaggtttcattttacaactttaattacttttcctctcttaattattttcttttcttttctttctttcttatggtgggcttatatataggtgcttgtagtccaggaaaaaaaagaggtacattccatgaaaaactggcctgtggaagatacctactggaatagttgaagcggtatgaacattttcaaccaaaaattcctccccacgtgttgaaaaataaatatttcaatttgtgtagaaacatgaaattaacatgataacttcagggtgaggagcttttagccgcagctgttagagaagtaaaagaagagacgggagtaagtgtcaatgtaaaatgttgctatgttgcattttatatttgttgttaattaaatgcgcgccctttcttatgttgtattaatataactcaactttgctatttactttccttgttcagattgatacagaatttgtggagttactggcattcaggtctcaattttcttcctcaaacttactttagaaactgaactaaatgtctgtctcctacccttttttcttcatcatgattttagcattagagaatgtaaatatataaattgtctttgccttcactgatgatagacatttacttctcataaaatctgcctttcttctttccctcttattttaattttgttttaagctgctcctcatgtttatgatttgtaggcacgcacataattcactatttgggaaatcagaactgtttttcctttgcatgttgcgtactctttctactgacatcaaaaagcaagatttggaaattgatgctgccaaggtatacagtctttcttttatttggtttggatgtaaagatgtcacaaatgatcaatgagctaactgattaactttacacactatattgccatatctgatcgagtcatgttttgcatgtctacatttaacaaagtttatcattaatttttatatatcaagtgacaaagtagtttttgttctcatcacccaacaaatgatagatattttgcaaggataagaccggatcacataagaagtgacatatatatgacaagacacataaatgaagcatccttctttaggactagctagtattaattgtctaacagatgagccaagcgacgcatatatatatatatatatatatatatatatatatatatatatatatttacacctaacattttaatgcgcatgctctctacaacaaattaaagttcaatggcaaacaaaaaatgactttcattctggtgcgtgaacgtgaagtttgtgtgacataatatgatagaaagttggattactctgctgaatatatatgattacacgccaaactgtgtttggttggattaagcattactagacattttaattgcgaccaaaatttttataaggattatatgaccactatccacatctgattattttgtccccacatttttagcccataaagcaacatataattatctcgtgcgtaggttcggatcgatcacgtcccttgcatagttggaaaatgaccatgcaactcataagaatgatgtggattcttgaattattaatacatgcacatacgatagagggttctatttgttggcaatttttctacatgtttaaggttacaattttttgagcctctccaaccatattaaattagatacgaatattctttcaaacatcctatcgacacattttatttttctttttttatcatatcataaactctataatatttatatttttcatttttctctcacctactaagtgtttaataacatttgaagtgttcatttatcttttttctaactatagttaatacggtaatacccttttctctaaagaatttaaatcatatatgctgactaattaactttacactgccatatctaagtgatgttttccgtactaatgtagtgctattgttggtaatcatcttgtaatttctatttctacggtttttttttttttttttaagaaaaaactatacaataatgagagataaggtggttaaagtgatagagagaaaagaaataaaagtataataaatgttatgtaaacttgttatataaataacttaacttttttatctgtatattattcaattcttttgacttcaattttcatgtatttcttccttttgtcacaaagtggatgccgtttgaggaatatgctgcccatcctattacagagatgcacgagcccttcaagtatgaaaatgaattatgcttagcaaagttagaaattaaggtgctatgctggattttctccacgacctatctcatcatatttataggagcaattgagttatctatatttaaatagccatgacttggacaagtcttccaattcagtcaacggtttgggtcttagacaaaagttgaatgatatctgtttctcacatttcagatgttaattagctgctcgttcttgtttcctggatttttcatgtttaggcacagacacggtgattatgccaattgatcacactagctaggcttcattttatttgatcgggtgcaactttagcattgcgtctaataaaccataatttctctgtttttgccctgtatttcttttaacaccacagattttacatttcgattaattagatgttgtgtaagttgtcgtgtcgaaatttgaacaattcctacacaaaaaataatcttatgactggtttgggggggggggggaatattttgtttatttggataaaaaaaaaatcaatgttttctcccgaaaattttgtcttcattttaattttttttcatctttcaatttccttttcttacaaacgaaccatagtgattttttgaagatggcagaaaaaatatagtaattttttgccccccaaatcttcattgttcaataaagaaaaatctctagttaaaagaagcatttacttgaaagaacttgttcagcttttagtgtcatcattgtactgaactccattatcagcgatagtgcaacatttatcaatgatgaaaaagataagttctaagaagaaaaaaaaaaacacctttaattaaagaaagagaaagtagaagtgaaaaggaaaggttgaaaattttaacaatccgttagcacagagactcatgcaaagaggaagacatttgtgtgttacttcaataatatcatgacagatgtgctgccatgcggcaccatctccctagtgtagaagaaaaggaggcgaatgatccaagactgcattaaaaacaggtgctggttgcaaatgaaaacatccaaatctagaacactcttttccttctaaagtctttttttcgagtatgattcattctgtgattttagaagatatgtctaggggagtcttcccaacagggactggagacaacgtctccaaaactttttttaaggtctaatgttgtttgacttgtgttttattatttatagtttggaattaggtccataaataactattatatttagtatttgtaagtctatatattttttataatttgagtgtaattatacaagtgtgtaacaaaatatagtgaataattgaatgtaatccacattgggtgaactggctaaattctgtgtgttattttctttttctcttttatctttttattttttctcgattattatgtgattgtttagtatccaacatttatgaggtcatcattgcaattcccattatctcccagctccacactcctttccttcttataaatgaattttctagtctgaagtaagtaaaacattaaagttgagagaaaaagaaatgtttggagcaaagtttgtggcagttgtagttgtaaccctctggttatcacagtccaattttaattttgaagcttatggggatgcagtaggtgatgtgatcccaaccccaacttcttgtgagaattgtcaggttactccaccaccttctggttatccttcttatgaagctccaccaccaccatcacagccagctcctccatcttctggctactctatatatggtgctccaccaccaccatcaccacacaagtcaggccaatctaagtgtcctcctgctgcaggtgttcagtgttgtacccctcctgcaccttacacttatggttatggttatggacctccaaatccttacacctatgtgccttatggggaaggtcaaggccctgcttctatggttctgccaattatagcccccctcatcatgcttttttcctcctttatttttctagtctgaatttgccttctttttgttgtttatcgtcgtataatatcctgttgtcaatactcaatagttataaatgcttttgtaatatattcatcttgtgtagctccatgtggtatataccatatcctctccaagttcaatatccattgttatatatagttaaattccctttatgaataccctctttttggtatgaatatgatagcaagaaatcttttttcttagcaagtttgtggctaatttagtatttgttttgggggaagggaaggcaattttatgaagttttgttatttattttgatttttaagaaagggagatggagagaacaaattctctcccccatctacttttagcttttctccaaaatttaactccaattcattagttcaaaattaaagttattttaaggaaaagctgattggaaacacagagcatataataaaattctcttattctacgcaacatttttgtttgtactattctcacaatgattgttgtcattgtattacctttgtcctcgttactagtgacatttacaatctgtcactactagttactactactatttgttatatcatcaccattactttatcgctaccatttgcataaatggtagcatacaattatcaatattgttagcattattactacaactaccatcagataaaataacctaaataataattttttaataattaattatcaatttggattgtttgaaaaataattatacatctgggatagttggtcacagatggagcgatgcgtatataaactcggacgatcataacttttgactggtttgtccgattgaagcgtaatttgtgtcaaaacgctcgaaattgagagtagaagccctaggcaaatcccacaagaattatacacatgaaatttgcttctaaagaatgggaacatgctattaataattttaataaacattttttgatagaaaataacattaaaaaataacgtttaatatatctttcaaatggtttaacttttgatagaaatgtccggtcgaggtgtacgatatgttaaaacgctcgaaattaagagaggtaattaaaaaaataaaaaatagcatgcaattaactgaccaaataattaaaagaatagaaaacaagaaaatttttagatgttcgaaaattaaatcataattttgaggcacttagaagcattttttgggaatttttttgaccaaaaccccttcgaaaatttgtctagggcttctactctcaatttcgagcgttttgacacaaactatgtctcaattggacattccagtcaaaagttatgaccgtccgaagtttatatacgcatcgctccatctgtgcatgacacgtgtcgccctaaagtggaacacgcccaaaattggacgtgaccaccccctagtcacgcctagagctgggcgtgactggtcatgcccaattctgggcgtaaccaattaccccagatgtataattactttccaaacagtcccaaattgataattaattattaaaaaaatattatttatgttcttttcccaccatcatcattattacagttataattgcaatcaccattgtccccatcattattaacagatagtaacatatttgtcactattattaacactattactacaactatcattatttttactgcaataattgcaatcaccgttgtctccatcattattaacagagagtaacaacatatcaaattcggaaacgcggttaatccattgctctagcaaggtaaaacttttgggtggagaaaatctgcctaatgatcaaaacagctaactaacggttactgatccagattctagaaatggtttcagcctaatgctgcattccagtaattcaagcaggcatgtgatcatgtctaccaataggtaaacggcaaaaatgtgaagaggcattttaagatgaaatggttttgctttacagtcctcgtatcacaaaatttaggtaatttctttggcaacttcagagcccctgatacaaatctggcccagggcaagttgtcattctaagtatatgagaagaaataaataaaagcattacacatgagagagcctgtttttgaatgttatatgcagtgtatgattcttgaatccatgataccgcaacaaaatagcaattttttttagattgttcccgagtgacttatacagagtagttgataagggtccaacacctaagcattttctaagaacagcagacatgagtattgtaaagctaatcacagatactatagatgaggtcaagtaatagaacctctggaaacagctttgatgctgctgtttttttatcaacatcaacttggataggtagccggatacctatagatcccacttgagggacattttgataaataaggaaaggagtataacaacgaacaaatgaaatcccgattgctttttaaagtggatgctgagaccaaaggcaaaactattctaaaactaatcaatgcaacatttgagaacagaattggattggttggacacaaggcgaagctaacagatagcatattgacatcctgttatcctttgattttacactgaagttaccatggatatgtagtcatccttactataggttgtcaatcctcaggccctcctaaccttgggaagagacatggaactttacatccacatatcagagtttatgctccatgtaacacctcaagatgctaaatgaagattgattaaacatctccagaattatcctagtccaacaacctttaagcattgacgccatcttgtatctctcagaaaagcttgttgtatctattaaccaacttctgtcatacatatttcaagagtacttagtacttgcacattcaactgaggctcacactctatcacgactgctctacatgtgtttagaacttgtttggatatgcttctctaaaagcatttctaggagaaaaaaataagaaacaacaaatgaaaagagtttctccataaactaaaatgaactcttcgtagctaatttgtagatgtcctctcatcctttagaaaagctatttgagagaacttctacaaattagctaattgagagcacattttagctaatggagaagttcatctcattttcttatttttattttcttgtcttagaagtgcttttaaagaagctcacccaaacaagcctttaggatataaaggaaactagaaagacacgggggagagtaaaatctaaaattgtcacatagattatccttgatcaatcaaacatgctactaatcgagcagatgtgagaaagtaactaaacactttaagatctaatatagggatcttcctgcctcaatatttacttattttccctcgttcattaacaggccaaaataacaatttggttccaaagcttccagcaaaagaaaagaggaaaagattataacttcagcaaattacccctatatgtgtttcctacttccgctatgcataaccattatagaaaaacaccactctgaagtctgaactcttagaagaatagctcaaactaaaacctaacgacataagaactaagaagagaagataactgattgtaggattgttaaaacatacaagaaattaacatgtatgtgtggcacactacaactcaaaagccataaccattcagtaaatccagagagatataatattgaattcaattaacaatggagaaggggaagtttctcatcatcttacaataattcaatcctgatttagaaagacatactagaatccagcaatgtaagaaacaactaaaatccgttttgcagaaactttccaagatagttaactattaaggaagtgaaaatgcaaacttttccactacttaggctgaagttgctttgctatacaattaaattatctcaataacggattggtgattcaaagaacttgcctatcagctgcctcagcaacaatgggtaatctggggatttgacccagcaagcaagaagaagaaccataaatcaagcacaccaagaggaacaaaaacacagtgctatccaaagtcattatcaaatccaatcccaacccatccttgggattaaaccctctttcaaggaggtcagggaaaatcaagagcacatcaaggacaacggcttgcatagtgttgaacctcacatacttactgaaattggggtttctcaccacaacaaaataaagggtcaaaaacacaaggaatccattaaaagggaagctcttgaaaactcttattgcaggaaccaatggttgaacaatggcttgaacagggtagaactgtgtgattacatactttccgtactgtatgccatcaaagaaagggtaaaagtagcaaagtgctgaaattaaacggtcaggaacatcagcagagtcactgccattggatttggccactatgagggttctcagttggtggggttttctcaatttctttggaagaatgtttagagtgagaagagaggggggatgcagaaaagtggattgaagtggcttctgtgagaaggtaaatgctgcggggcagaggaaggaagaggaagccatgtttcaaacgaagattcgattttggatgctgtatgccaaatggggagagaatatgacgagggagaaagggcacgaggatagataacattacagtattacactctttcttctttcaacaaaaactaacaaaaaaaaatatcttattttcttaggtaaggaaagtttcatcaaaaaattatttttgttaaagattttattcaattattatctaacattcaatcttgattttaacacattaattacttatactttaattggttttggacataaaataattgaataacattaaatataaataatagaaaatggacaataaacctaaactttaaaataaacatgtattatttgttaaatagttttatatttttatatcttgtaagaatatatatttttcaaatatcattgattatttaaaaataataaataaattctctgaataaaaatatttttttatatgcaattattttaactactctgaaaatttcaacttttttttatattatataatgaacatacaactttttttaaaatgttgttgtgaataaattgaaataatctaagaataatagtttataaaatgacaaatgagaaaaaaaaaaagatatagatttaataatcaattctctaaacaaaatcaattattagagcagtaaaaaaatcagcaactagagttttacatgattccattgcgagatggtatagttgtgggctggcttggattgtatcaacaaacaagcctatatacaacagcttacattggatagccctgaccaaaacaaattaaaggcccaaagaaaaacaaagctccagatgaagtaaaagcacgagtccttcccccatcttttgtcagattttaatatgcatgtacagaaattgtaaattttttaacattattaattaatgaaaaatcattattcatataacttttaaaataattattataaaaatcaataaattttatggttctgtgcgttaaaatacaatgtcagtgcatactgcatatattatttattcattttgctataagatagaataaagaaatggtagtttatacagataacttcaaagaaactatcacggattatggattgaattttctctaacgttgaaatgatttaacatatatagataaatctctgtatcaaattactggttgtgagtggtatatatgttttttttgatgtatccactatccaggacatttgatggtttcaggtagagagcaccatgcatcgcttatattcttcgatgtgaatgtgtattggcagcacactgtcatcgcttatatcaatttcaatagttgctaatttcctataaaaaaaaaaaaattacctttatcaatgagtaatttgaggaattgaagtcagcttattcagtggcaggattcgaattaataatacttgtagaaatgtttaataataacaaattaaggtgacgagtttgatcaattgcttcatttctgatgcatgcaatgaacaaattatatactttcttcgtgtatattagtcaactttctgatttatatccaagtgagtattcatacctttaacacaaaatcttaaaacttaagttttgtggatcttttctcacttgtatgttaaagaacttttccattattatctaatatgagattttgacgtcacacttaaattctaacacaactaataaaaaatgtttcatcattcatatattcagctagaaaacacttccaatcacatgtatattcagctagaaaaaggaatatttgacaatgtgcatgggatggacgtaaataataataacaataaataatatacatgtgatggtacaaaaagaaagaaaagaaacactgtactttttaaactttgcaaagtgcccaatgaccaatgaaagtaataaaatccatacttatttcttggtgtaataataataattaaggttgtaaaaaaattataaataatataattttatgcattttaataaataaaaaattcttttaattccttaaaaaatgtcctaacgctatcgaaactcattagcatttttccaataataatgatagaataatttctttccctttctttcacttcacttcagcccccgaaattagtctctgagtcccagtggcaagcaagcactaaagagtaggagtgagtcatgcgttattatgattttaaaaaataataaaaggagcggcgaatagaggagcacgtcgatggtatgtatctgactatctgggtctacaaggcccaggcccaggcccaggcccaggcccaggcttacccataacaggaaaggcagcaggaggcacttgacgatggtggtaagcaggggagccgtatacgtgtccctgataatgatgataggcggcggaggcggagtccttagagtcgcgggcggcgacgctcttctcgccttccatctcgcggaagcgctggaggtatatcttgagggggtcgccgtagtcttcgaagccgagggtggtcatggcccagagaaggtcgtcgccgttgatggtcttgcgcttctccctctggcacttgtcggaggcctcgccggttatgaagctgatgaactccgacacgcattcctgcaccgtctccttcgcgtccttcgagatctttgcgttcgccggcaatgccttcttcatgatcctactcacgttcgcgatcggcaggaacctgtccagttcccgaggcgacaactccccgctgaagctccccccctcgtttcccgcgttctgcgccccgcccgactcgttgtccgactcagccatcttcttaacttaaccaatcaattcaacactctgctctgcttttctgagttcggttgacttcagagttcgtgaaaatttgagttaagaatggactgagcagggtccgttggatcggctgcgttaataagcctttatctgcttcacacgtggaaccttcttggccgttgtttgtcgataagcacggacaagtttcccaccatgggattggatgtcggattaatcatctggaccgttcctttcgtatctgctacatgctctcctctcttctctcgtttattctctttcttccgtctaatattttaattatttagcaactttgttgttttatgcccacacatcttaaatataaggttcaagattcactggtttttggataaatttgagttacttgttattaacagtttaaaattaatttcagtatgatataaataaatgaacaatatgctgtgaataaggtaaatgtttcgtgtttgtaaaatacacacggacgcacccccaacttatactttttatttgtttgttggttttagtagtactcgaaatcttagattaaaataacagcgctatctcacttcaacggcgggttgcggcatccaatcgctacttttttatcataatgcgacggtttccagtagcggccagtgatggccgatggcagcgttgcgggtgacaaatcttgcagcgctatcgcgccgctacttccatggaagctccaaatatacaaaagtagggattttattattctttagtgccaaaaaatcaatgatgtcttcttgatggatgaatatatagagtgtttctatagaagaatgctccaacactttagttactagcaattccagcaagtaatggtaaaggaagggagattatatgtgcatgaaaattttattttgtcatttataatagtgatctattttgctggtgttattgtttcagtatctccttaatcactttattaccactgtaacaagggtacaatagaatcagaggtacggtggtccttataacagtagaataattttgttatgacctttctttgattcacttgggctattcaaggcaacttagggtctaattaaacacgaggtttgagattctgatctacaattacctcaacttgagcctgatatatttatatgttaggtttgggtttttattattttggagactttcaatagctgtgtttgcatgtcaaacaagttgcgattacttcattcatgatcttacttctatgttggccccgattttgtttaaagttattattttagttcttaaaaatcttaaacatctattttttaattcttgtttttatgtagtgtagacaattaaatggtttttttaatactaaataatattttataattttaattcttatttttatatttttaagaattaaaatggtgatcttttaatgaagttaaataattttaaatatgaaaaacttaattaaacaatacttgttatgtcaaaatctaattttgaatataatgtattactcttgttatgaatcttaatgcttgagttttatttatgaaaaaaaaaggtgtgattagatcatttagatgtgtcggtgttggccataccacggtgagtcttttgagttttaaggcctccttgtccggtgtccacatcacaaccaaacgctatcctttacattaactaatgttatgtaaaggatgtaaaaacaagtgagtttattaatattttgttctaattttagtttttatttttattttaatattgcataacttttatatgtattatttataattttaaaatttacttatttatgtgtttaattcttatgatgtatatttcttagctagtcgtaattacaatattctctaaccatttatagaattagacttcattttatttttgggtaaatagtgaaattcatcctccaaagtatgatgtagtaaaaattgatttgatgaaagatgaaaaatataaatttagtccatccatattttcccaagtggaaaaaaaaaggtgtattttaaagttatactagcttataacactcctagaatctagattttctaccacaaaattcgcgttatggatgtattggccgttctcgtaactgatgttcaatggaacgtttgcgaagtagtgacagttataataatatttacactccatgtcaataatctcttttgttgaatttaattaagctactaacagaaaaatatttacaattagtgatttataactacaatctaagttgttaatttattttatattttttttataatttacattatcaatcaaattgtgatttcaaaacacaatacaagacaagcatctgccaagtttatttgaatttgagactttagtcacttgatcactactatgaaatcacctccaatcattgcaaagcatctggagaggagtatattaaacaacaccaaaaatctggaaaggagtattgttagtagtaaattgttttaaacatactttttatcgtttattaaaatttattaaaaacaatcaaattatttcaaacatgtctaagcacttggacaaaagctaacaaacaaaatttatcgtttattaacattaatagtgttttctttctatctctcttttgtattgcattaattttcacataaaatgaattcaatctctctacacctcttttttagttttaacataattcattacactctaacaaatatttaggatacattttttaactacaaatattttactatttttcatgcaatgaacttaacattaggggtgtacacacatcaatttgaattgggtttgacgaaattgattatctaatccaatcaaattaattttggtcaattttccaagaaaaaaatttaaaacacaaatcaacccatttgtaaacggtttggattgggttgagtcaacaaggtcaaaacatataaatttatctattattttttaaattttaatatttttataagctaaaatttttattaaatggaataccgaatacattacttataattattacgtgtagttaaatactagaagaaaagacaaggaatggaagaaaagacaaggagaggaattacattattgtcatcatcatcacataggtcaacataattatgttaaatatagtttaaaaattgaaacataataaacaagttcaataatcacactcatgaagcctaaaaatacaaaaactatagttgttatatcatagttttaaaattttaatattctcaaatagttaaatgagtagtgcagctgaaattttaactaaatctaaaatagttttaatacaaaattaaaaataaaatagatgttctacaatcaactgagaattaaaaccttaattttgtgagagtgattgagtgaacttgtgaaaactaagaaaagataaataatctcacttttagttattatgtatgatataaatagtaattgattttttttaaatttaaataataataataataataacttaatacaaattaataagccaaatcaactagttcatatattaaaatttgtaactaacccaaaattcaacaaattaaaatggattgagtgaatttgacccaaacacaaaaaatccaaactatttgaattcatttaagtcaattcaaatatgcatatatctaatattcataaacatccctacttagtattattcatcttcaactagaagaaagttaaacttcccaaatatttaaaagaaatgtttatctacttatatctttttttaagataaggatacccttaaatgacaacctcgtaccacaaactgaatcaacaatcggctcataacttgcattaacgatgaagaagaaaacgttcccataatggcctccaaagtgatagtaatagttaattgttggtcatctaacttgtggtacaataggtcaaacaagaggtgcagaacaatgagttatatatttgtaaaaaaaaaaaaaaaaaaaaaaaaacaatgagttatatattcacatcacccacccacccacggacactctcatgcaataatttgaatcatttggagacataggcttttcaagtaagcaaatgggtgacactagtttagttatagtcagtggtcacatacacatatggtgactttgcatatatgcatccactaataaacatcaattattaggggtgctaagtgggtcacccacccttgcatcattggtttaatttctattattgatgtgatgtccaaaccttgtgtttgtttcgttttatttgttcaactctttttcttacgcatattttttttagggatacaaaaaactagaatatatcaaattcaattgagttttaaatgttttagctcgtgtgaagtcttcattatacgtccatatgtaatgtagtattttaaaagtaactcgtgtcatactatagacataattcgactctaaatatatagagtctgaaccttcaaacagatacaacgttcctttttttcattaaaaaaatattaagttaatgaatttaaaattagttctaaagtcaacaaatctactataatggaaatttattatgggataatagtatataaaatgcatatccttttttctcaaataaaaataaataaaaaatagctattgcattttttttatataatttaacattgaatagtgttattttttttaagacgctcatttaaattagaaaggattttttccacacaatatttttcttaattacgtgataagtaagaaaataatctctcaaaattagataagtattagaaacaaagtcaaatgacacaagttaaaaaattaaatactgaagatatttaaaccccttcaacctgcgttgatattccgaaagaaagggatgtttggataagagattaaatgctcgattgcatcctttctgtgtcttcttttctatatgtatatatttcagtcaagactcgagtcctttctggtttttctttccagtgagtcctttatggttgactgctgcagagtaagctcggcccttattttatgggtcagagaattattaagcccatgtaaacaacgggctaataacccataagtcctcttaggaccacgccactagtttaattgtttatgcataaattcctttttaataaaaaatgctatggattcatatttgtaaagctagaaaaacaatagctaggaaaaaaatttgtaacgacccttctttgaaaaaataaactatcaaattgctcgtcaaaattacctatttctctactcttaaaagaaaatttcttttaaattataatcaccaattattaaaaatagtaattgtcacccatggtcctaaaacctttagttcaaattttaagatagtaaattgtagatttcccaaatataatatatttgtccaactacttattaaaatcgagagtagtttggtaaatgatttaaaaataacagtatttgttaaagcactgttatttactttatggcaaaaaaagcctatattttgcaacttgtaacatgcaaagtgcacagcctgagtcagcagatacacttggcacatgattgcatagtaaataaagtttcccggatatgagagggaatgggagatttgaagagaaaaggaaaagaggaaaataataagacaaattgatgacaagcactcacaaaagttcctttgtgtatctaaattagggaaggaaataggtttaacatgcatagagtcaatcactttggtctgacccgtttaattaaaaaaaaaagatttaagttttaaaaaaaattcatttagttaaataggttagacgtgagtttataaaaaaatctattaaatctgatagattagcatactaatttatttatatataataaaaattaatatatgtgtattatgcttttatatttaatattttaataagttaataattttatgtcaaataaaataaatatttgagataaaagactttaagtaaactaatagatcatactaaactttttaaaaaagacaaatcaaacttaaaaaaaaaaaaagaaaaaaagtcgttgatagattattagatcaaactagaccttaatttttaataataaatcagacttatttatataaaatctgatatatattttcactcctaatctatagtcattcaaacaaaacataatcatactgtgttttttaatgttacgaaacagataaaattaggagatttgattgagatttgaactaactcttaattaaaaaaaacacggcttaagattaaaacgccaagttaatagaagagaacaaaattttggtaaacatcaagaaggaaaatagctaatgactaaaacctcacctaaaataacagctcaagataacaattagtaataaaagattaatcactaagaacacaatgatctaatctgcaaaccaactccttctccaatctcaaatcttgatactttgtggatcccttggaaatatcaatctcaattaaattttcgtcctcattcatctcattaatttctgccaagagctctgtgagaccttgctgcttgaaaatggattctggcaagaactctgaaaagtggttgtttggaagcttgatttcaatcaagccatcctcctccccatcaacatcataatcaaagaccaagctatcagatatatcaagattttgatttctgttgcgatgaatctcaatactttcttcatccatggttgagctagcagtgctttcactatctgatggaagtgaagtatctgactgtggatcagcttgttgctcatacttccgagcacttagttcaaaacttgtatccatgatattgcttctttcacaatctaatggaaatgaggactctgagtgtacttcagcttgcctctcagaagtttcattttgttggatagtaacatctcccaatgaaggctgtaactccaaattgggttggttatcttggacaagattttcatgtagggacccttttttctttgccagtgtgacaagaaacaaggtagatagaagagcaatcagtagtgtaagaagggaaggagaggattcagaaactgaaaagaaaaaggaaattgaaaatagaaggacaagaactagaatgattggtaagaaactggcaaaataacaacacagattgtgacagatttgttgctttgttactttcaccatgatcattcactagaatgaacttgttgtgtcaaagccaaagcaaatgcaaagatccaactcacccaacaaagactgcaagaagtactgttgaaaaggagaagaagatcactgggaaagactacaaagaagtggctgaaaatttgttcaatctgtagttctgtacttcttttatgactttaaaatacagattgtgacacagcaaagatagagaaaaatttcaatgtgctacaaaggaatttgggacagtcaaaagagtcttttaagctataagttaatgctgataactttcagctcctaccctgcttcctattttgtaataaacagttgctaaaatgtcaaacagggagcaaaggagggaaaattatattttcaataagactcaaaagatcatggcttgaaccccaaagaaaaatatgctctttttcaccaaacctgacaagggtaacatttagtgacatctgatccttgaaagatcaagttcctttccactgctgagcaactctactagctaggaatccaactggcaagtgttaaccgaaccgtttcttctattttttttcctctgacacaaaaccttttattatttattatctgcatctgatcctcttggagatagcaaaggtgtttgttttccaacaatatttacaacctcaaagccttggatttgtccaatgcatgtgccagacatatctgacccctcccccacacatgccaagataccgaacccaacaaaacaaacttcatcaaaagagaactcaagaacaagaagggccttgcttctccctctattttactcacaaccaaacaaaaccacacagaaactcaatataccaaatcaggaaaaaacaacaaatttctcaaaacaacacttctttgtgggagttcttttgttgagacactttcctagtatgacatttccccccatcacatacatcaaagaaacgtttgacttcatattagttttttcctttcttttggtagcaatgaaaggattcgagtgtgatggcaggttgacaaaactttgctcctacaactacaattcctaattaacaaaggcacattaagtaatcaatattctgtaacaatgacccactttctattattgtttaggctcttgttgagccatgaagaagtaagtccttttctgcttcagcatgtcatgctcatgcaggctttaatggagtggaggccccattacagaagatgtctaaaactacatagttaggtattccccattactatatatcctgttccacactaggtaacatatcagctactaggacaatttagttacagttgccaattggtacaaggtttcaagagcttgcgtaaggaagacgtaggttcagcaacttatacagctagatgcctagattttgtttttaattagatcgatctaaacctactactactagtatttaatgaagaagactctttttatttatgtggctattttttatgaagcagaaaattaattaatacattttcttaattactattttatagtaagatggtgctaccgttagttttttttattcaataaatattaatttgttaattttattaaaaatatcgagatttgaaactatgattttttttttttttttttaacttcttgttcaaccttaaatctctttgtgctattgttagtgtgattatgtacgcgttacacatgctgttaagcgtgtcagtaatttcaaaaaaatcaataaaacttaggacaggtgttagaaatacaattttgtgatggataatgctcacacaattaatattatgacgtgtcagagtgtaataatgttgaaatattctgtcccataagtatatcaaatcttggtgaataattcgaagttttaaatggcgactgattaataatgtaccatatgcataggtgacagatgacaattactcaaggtgggtacatgcatatttctcatgtttaagcaaaaaattggtaagagacttcaattcatattatctttttattgatttctagaaaagcatttgcaattacatatcagaaacaaggtgaatgtccctgtcagtttttttacccttttttaccttcttgtattcaattattagccttaatcccctctcataatcatttgctcgtgcctacaaagaaatgatgttattatgagaaacgaaagagaacaaaagacaagaaaatcgtggaaacagaggccattcacaaaaagacatcgcatgactcaagcgctttctcgtgactttgattgtgtttcttggtggaaaatcttgttgattattatgcctactccttaatgattaatgttcttataaaagtctagcacttttcatcatttatttaataatattttgattttatgaaccttttatcaatattttgtgcaacatcatttgattaatgaaccaaacagaaatttagcaattgctaaaccgtgagattaaacttctttttatatgaaagttgggtgcaattttttttttttcttgggaaggccagaaaattttattgcaatgaaaaagaaccataaccatttgcacccaacagaaagccactcaaggtaaataatattatagaaactggattcgtgtagacatcatgcccatcagtccaaaatccatgtgcttaccatatttcatgtatccatcttccccccacaaccacaagcatgacctctcacgaatttgctgtgaatacaccatttatgtgaagtgttggatctattagttaatttagaattggtatatatatatccaatttgcacaagggtcagaatctgagtagtcaagaggaacaatataatctactacaactgtacaaaaacaaattaaatagaacctgtatgatgagtatgaatcagacacagatgcaaagagatgaaaggatccgagcccaacaatgttgtctccttaagacaatttgttccctccaattgatgccaaaggttgatgaacaagtgtctcccaggatagaacggatcaacgtctgaagattgatggcacttcaaatcaacagcccaaacgaacaaagctaatgcttgaggaaccacagagttatgtgatatggaaatgcactagtatctaagcgagaatatcagaaaagattaactatcaaaactctatcagtttttctgcttcttctttctgactgtctctgtgtctatttatagacaacaaacaaccctggtgaagagttgccggtaaaccatcgcgactcttggcgttgaatcatcgcgactcttggcgatgaaccatcgtaaccgttggttatcggaacggttgggagtagttattttttctaacctttcccaagagcggttaggagtagttattattttgaattgttaaccgcctcttattcataacccatggagtttaaataaaaactccaacaatcccccacatgaataagagatcaattcaacatgactaaatgcatatgaatatgtatgcaagtgtgattcctcggcgagaaacaattgcatcgagataggtaggggttacctttgaaccttctctagtgtaaacctatcgggtatactaggtcaatcggtggtcgtgatgccttgaaccgtcgacctttatggtgtataccgagacaataggagacacacaattgcttctctagcattgctcgtcctcattgttgtgtccattttggccgtggacaccttcctggttctgcaagtgttatagagaatcggcctttttaagttctcattgaagcggccctcacttcacactcacataggtgatttcttgtgatatacctccacatatatcatctgaacacatcagattaagaaaccattaaaagccgttatgcttaccctcatatacactgtattgtcataggaatgagtatgagtttaaaaactccacagtgtttaacagtcgatcaagacttagttgtctctttgaacctagttcgtgggatctccactcatcaaggtagagttaccgcgatgatcaacaattgataggccttaaacccattcctttcgacaaattttcaactagctctctaggaatccctttagttaatggatccgctatgttctctttagacctcatatagtctattgagatgattccattcgagagtagttgtctaacggtatcatgtctacgacgtatatgtctagactttccgttatacatgatgttcttagccctaccaatggcggcttggctatcacaatgtatgcctacagctggtactggttttggccaactaggaacatcttcaacaaaattacgaagccattctgcttcctcaccggctttatctaaagcgataaattctgcttccatagttgatcttgcaatgcaggtctgcttggacgatttccaagatacagcacccccaccaagggtgaacacatatccgcttgtagatttagtatcattagaaccggtgatccaatttgcatcacaatatccttcaataactgcaggatactgttcataatgcaaaccaaagttttgagtgtgctttaggtatcctaaaactcttatcatagctttccaatgatacatgtttggattactcgtaaagcgactcaacatgctcactgcataagcaatatcaggtctagtgcaattcataacatacataagactgcctaatacttgagcatattccttttgtgctttagctttgccagtatttttcaatagtcgaagactagagtctatgggattattcacaggagatatatttaaacttttgaattttttcaagaatttttgtaatatagtgagcctgtgatagagccaaacctcttgatgttctatggattttgatacccaaaataacatctgctctttccaaatctttcatgtcaaatttgctggcaagcaattgcttagtagctttaatcatttgattattactacccattatcaacatgtcgtctacataaagacagactatggcaaaccctttatcagtattttgaatgtagacacacttgtcacattcattaatactaaaaccatttgataacataactttatcaaactttgcatgccattgttttggagcttgctttaacccgtaaagggatttaattaagcgacaaactttccgttcttgtcctggaacagaaaacccttcaggttgttccaaatagatctcttcttctaagtctccatttaagaaagctgttttaacatccatttgatgtagttctaacccatacaacgctgctagcgcgactaacatcctaatggatgtaatccttgtaacaggtgaataggtatcgaagtagtcgagaccttcgcgttgcttatagcctttgactacaagcctagctttatatttatcaatagtgccatcttccttcatcttccttttgaagacccacttacttcctagaggcttagtgccaggaggaaggtctgtcaattcccatgtgtgatttgacaagatggatttaatttcactattgatagcctcttcccagaatggtgcttctggggacgttacagcttctttatacgtctgaggctcattttctaacaaatatgttagaaaatccggtccaaaggatgtagtggtcctttgcctcttactacgtctaggttcttcctctacaggattaacactagttgtagtgtcttgaagtctcacaacattatcattgtcattgccacttggttcatatatatcctcaaagaacctagcatcccttgattcaataatcgtattaacatgtatatctgagacatcggatttataaaccaaaaatcgactagcactactattaagtgcataaccaatgaatacacaatccacggttttaggttcgatcttcaaccttttgggtttaggaaccgcgaccttagccaagcacccccacactttcaagtatttcaaggatggttgctttcctttccatacttcgtatggtatgctctttgtcttcttgtgaggaactctattaataatatagtttgccgtcaaaatggcttccccccacaagttctgtggtaaaccggacgtgattaacatagcattcatcatttcttttaatgtccgatttttcctttctgcaatcccatttgattgcggtgtataaggagcagtcgtctgatgtataatcccagattctatacagaattcctcgaaggggccatcatattctccgccacgatcgctccttatagccttaattttcttgttaagttgattttcaacttcatttttatattgtctaaaagccacaagtgcttcatccttactattaagtaaataaacataacagtatctactgtaatcatcaatgaaagtaataaaatatttcttattacccctagatggtacatatttcatatcacatatatcagtatgtattaaatctaccaattcagttgatctatcaacagaagaaaaaggtaattttgaaaagtacagaaacactgattaatcacacagatcaaacagaaacactgattaatcacacagattaatcgttcaaaagtacagagagtagacaacagtatataatataaaaagatagaatatactgaacccagattcaatcaaattgtcttaagattgttggatctattagttaatttagaattggtatatatatatccaatttgcacaagggtcagaatctgagtagtcaagaggaacaatataatctactacaactgtacaaaaaacaaattaaatagaacctgtatgatgagtatgaatcagacacagatgcaaagagatgaaaggatccgagcccaacaatgttgtctccttaagacaatttgttccctccaattgatgccaaaggttgatgaacaattgtctcccaggatagaacggatcaacgtctgaagattgatggcacttcaaatcaacagcccaaacgaacaaagctaatgcttgaggaaccacagagttatgtgatatggaaatgcactagtatctaagcgagaatatcagaaaagattaactatcaaaactctatcagtttttctgcttcttctttctgactgtctctgtgtctatttatagacaacaaacaaccctggtgaagagttgccggtaaaccatcgcgactcttggcgttgaatcatcgcgactcttggcgatgaaccatcgtaaccgttggttatcggaacggttgggagtagttattttttctaacctttcccaagagcggttaggagtagttattattttgaattgttaaccgcctcttattcataacccatggagtttaaataaaaactccaacatgaagccaatctgcagaaagttgagtgcaattgatttcgagttgtaataccatataattaagataagtgtctaaattactctcaattataattttttacattcaaaatgtatgtcgtaataaaaataatttattactggtgcaaaataaagaggcctaagtactctacatatcactttataacattttaataaccttattcggagttgtcaaacataagatgattaaaggtggtaaaactcttcctaattaataagttttaacacatacattctttagattcatattaagagtataagttaaattaaaacaattcactcttaattagtttcgtactcactttatatataacacatagataattaaataatgatgaaatttaaaataaggatatattattatttattgtatatttgtattccaatttgtatttgattagaatagaatctatgaacaatacaaaaaaacaataaaattgaaatttatgtacattttccttaatatataagtaacaaagtaatatcaaatcacctattaatttaatacataaaattggcatttcttacacccctcccctcccaaagagttatatgatgaaacgaataaggttaaactaaaattttaatccttttatttttatttttattttattttaacttatgcattaaaagaactctgcatataaaatttcatgtttcaagtctccgtcaaagttttaccggtcttctttttaccatgtaagagtcaaaataaaaatgatattaattaatcttttatataaaaaagaaattaaaaaattaaaatatttttggaacaagaatcaaaattaaaatattaaaaataaatatctaatttaatatcattacaactttgacaaataaaatgaattaattcataaatattttttaaaaaatttaatgatatactttttataatgtttttttgaaagaaatttaattagatttgaatatcatattaaagttttaacaaggacattttttcatttaatactaaaatgttgatgcggaattaaaataataatatcatataaggacaacttttaaaaattacctaataaacaattgctaatctttatctcttataaactatcaattattctaccaataaaggaaaaaaaaaaaaatatactacagagaatcccacttgagaatcaaagtgacaaaactgcccttcaatctttaaacaattctgtccgaatcagtatgacatttaccagcgatcaaaccaaacaaacgtgcacagtgaaaccctatagttagggtttaattgtcctctcaatttccaccacaagaaagcatctttctctaatttgatttattttttgtgttttattctttcgagatttgtgtttgtgaaattttgctgctatctattcaatcgggctttatcgcccattcaaatccatggtcgtcagtttactatggatccctctcatcagattgaacaacaagaagacgacgagtggggtatgccatttttccttcaatttcgtctctttttttttcttctttctcttttgatctctggatgaccaaaccggaacagagaagggggaaattaggatcttttgtgttgtttttatttatttatttatttgtttctgcattagattgaattttgttgatttattgcatatatgaggatctcatttgattttgacaaggattggttattaattaattcactgctattgcttgagagttcgtcatgttatctggattttattttccggagatattgcttgtggcgctcggtgcttcacatccgtgtgtaaggcatattgttctagcttaatttgatatccagctgattcaattttaacactgtttgattttcatgtaaattagaggtatttagggtaggaatcataatgtcctagcatacagagaatttatcattgatataggtttgttattacatgttgacatgttgtttatgtctatacttatgcataaatatatttcagttttgcaatttattgtgctatatgttttgctatgaaaatgaaaagtctgtgactgtgttcggagttttttttactttctgactagggatagttgtttctttctatttagcaatgttgggatggcttctatggggacaaaaatgcttttgcttttgatgttgaatggttggacttttttttttgttgtagacactgatggatttgtgattccaagtttgggaattgaagactcagatcaaaataaacctcatgttcctgatgtagaatcttctaattctgcatcaaaggtcagctaaagaaaatttcctaatattagagactatataattttcaggttttagatgttgatactgacagggaagacaatgtatatgctaactatatttgtttgtgttctaggctaagaaggaagaaaacatctatttgggcccacatggagcgcctccttcactagcaaagcagcaagagctaatttcatctaaccggaagcaaaagttcaagcaaaagctgaaagaagctgacaagagaattagtgggatgggtagggagaataaagtggataacctgagggagcttgtgggtgtggggaaattaaatgtcaacaatgcaaaggaatctcccaaggattggttagatccacattgccaagaatctgagtttgagaggaggtaatgccctcttagtcacggtagattttgcttttttgagctattttattcttcgggattgtccacttaagcaccttttgttatacaatttgatctaatctatcgagacccaagtatgaggtcatgtacttgacaataaatttattaattagtgctttgataataaaggtattttgcctcatagtaaactgttcatttgtgggaattggagacttaccttgatctcaattgccaactaatcctgatcaaggaaaaatatcaaggagctaaggttcacctaccttattgactgttaacattgaaatctcatttaatgtaatatctattagttcaagatgttccaaatataagtcttttaaaacagaagttattgttattcattcaacaagaattaaacgatatcaacatcaatgacacatttaaatgacacatttaatgatacatgaatctaatgttagatacgaggagattgaaaaaaaataaaatatatatatatatatatatatatatatatatatatatagagattttgagatgaactattatgatataataagaattaaaggataaatgaacaataattacatgaaaattctttttgataaaattattaaattgagtgaacctcaattgtacaaattgtaattattactgattaaaaaattatacaattttcaataaagagaaactaaattatgcactcaatgcacatttacaatatttgttaaaaaaaatgtacatttacaatatcattcataactgttatgtatccaatgcaagtttttatattaaccattaaactcaaatttgaatgtcatgtcatcacaatatatattttaattgtccaacttcaataatttatgcattttccacgctattaaactttttttcaattcattatatgattgtattggacacttgaattattggtttgtattcgaagatttttgccgtgcactatttccagcttcattaatttcaaaacgaagaccgcaggcctaattcatccccgaactgaaatagttagttcgaattgaatatatttagtttacaacaatttggtcatcttggcctagttaataaaccaataaaccatgaagactaacaaagaatgagccgtgtaatacccccaaaacattgtattaataagtgtaatatcttctatatcaataactacaacaccctcagttctaacttctaggtgtccactctcatccaagactaagcactcaagcatatagcagctaaggcagtggcattaaattttatactctgaagaaaccttctcacttgatgcccaagaactccaaaccagttgctttctgtgtcaaaccaagctgagacaagtattcagcatcatagaatttgctcaaatgtctcattccactgtcgcagagaatggttacaattgtgtgaccagtgccaattgcttgcgctactctaactgctccaacacagttcattgcagaagaactcccaaggaagagaccatcgttcttcaaaagaaacctgatacatcaaaaacaacatatcactttatttcatcatttcttcaagtttgacagaaaagaacaaaaaaccgctaaaaataagaaaagtaggatggtttacaaaagagtaagtaacaacctagacatttcaacagcttccctatcggtgcctctaaaggccccatcaagttttgccattgcaaaattccttgttatcctgttaattccaattccttctggtatagtgtcaaatggattcttgagtcttcttccttctgcctcctctttggtgtacatcactcccctagttaccttcttaaacaaacaagagccaggaggatctacgaggaagcacttgatgtttggattcttttcctgttgaatatagaaccagaaataactcacataactttcacactcaaaacgacaacatctacaacctggaggaaggggggatgtggtgaacctgaagaaacttagaaacaccagccagagtaccaccggtacccgctgatgcaacaaatgcatctaactttccattggtctgctcccaaatatcaggccctgtaccctcataatggaccctgaagttcgctaggttctcaaactgatcagcaaaaaagccaccttgacaatcttcaaaacagagagctgtaattgcatccattagattcataaccatttattttctcggtgtcctccttgccattcaattgttatgaatttctacgcttcaatgcaaactcatttgcttcagatgctggtcttcttgcaatattgacaaaatggtctttgtgggtgatggacaccggtctcactctttcaacagttgccccaagggcttcaagtatttgagactgaaggttgattcatgcaacacaatcatcaattgtacacaaaatcttagaggtttatcgctagatttcataacagaatttacttgattacattacaatcattataaaataccttctcaatggcagcatcatctggtataaccacgtgggtcctgcacccataggcaggagcaacggtggcaatgctaatggcagtgcttccagcagtggcggagccacattgaaaccagcggggccatgacactacctaaaaaataaaatttggcactacctaaaagtaaaagctggctccgccactggcttccagcactcccttcagtgattattccacctggacgtagctggccagattctagagcctgcgcaatcaatcatagggacaatcttaaggctgatattgttatgacttaagcataagagggaagtccaactcaaaagactagttcatcaggttggagagcctcatgacttaaatatcacattaaacttcttattctacttgatgtagaactcataatttaaatcatgtgtgttaatatgttatcaagcagattccagatatcttcatatcatgcagcaagttgtgcatatcatgtaagtatttaagtaaacatagcatatgcttaggtgaaaataacataattgaggcaattatatatagaaggattgtataggtggtacatgtatatgtatatcagattgagaatgaatgaaaaattgatattccatccaaaagaaagcaattctgataattgtatgaaaaacagtgaataatagaagatgcgaatggttgaaataaatagatagagagcagttgtttaacctcatgaataatttgaacagcaacgcggtctttgacgctacctccggggtttaagaactcgcacttgcctagaatctgaagagaaataaaaataggttgagagtggaattggtaaagagaatggaagcgaagtgatcatagagaacataaatacttggcaaccagtggcggcggagaggctgttgatccgagtcaaaggcgtgttgcctatggcgtccaccagtcccttcttcttcttcttccttgattcgttcttcttcttcttctatcgaagggagaactatttttatagcatttttttcaaatttaaaatgttgttctctctttcttcttcttcttcttcttaccagcaaaaaatattagcaatatatagtccgaaaataataaatgatcatgagcaactagggcaacacctagcacgtgcagacctaagctcaaggaatgagaaaaaggtaacaacaagccaatgttcaaatctactatcacaccgccaaagtcatgactcaagactcgtgtgattctttcagtcaaacttttcttcatcaactaaagacatggaaatatagaggagtgcaatgcaaactgtgcaagcgtgtgagggacacaccaattgtagacagatgtactacttaggaagagtcactttcaattcataagatcataaactcatcactttttgaatcatcatttcaatgtgtttggataagatacataattgattttgggaacaagaactgtgtgtgtaatcgtgaattttgagaagcaactatgtgttgctcatggtcacaattttttttttcattgtgccaccactccaaatacgcatacaatgtaattgacagattttcataatcgattatggaattaaaaatcatggtgtgaccgtgaattttgagaaacaactatgtgtggctcgaacttcaccgtgggattggtcacaattttttttatcatgctgccactctagacacacactcaatgtaatagactaattttcacgtttgagtttgatatgtagctaaatttaaattaatcgaataatctctttttttatccaacttatctcaaataaaaatggaattaaataatctcattgcattttatgggtatacttaatatttgcaattaataatcttaaagtatattaatgattgtattgatcaatgagaatgtttaaccttacttgaagtgaattagacaatctctttctttaatttcattattctcagtaaaattaaaatgtataattttcgacttctgcccaggttcaacttataaaaaaatgaagtgtgtaaaattagtgtgtgcgagcattattaattttaagtaaaaactctagggaacaaaacggttcacacgtgaaccgaaagaaaaatgctaatatattagtatggttttggggggatcatgaactaatttatttaaatttatttattgaaataaatgtttattttaataaaataattttttaatgtgttcgtctaaattgtttatgtttaaaaaaaatattttatttattttaataaataaatacttgataagttttgtttaaattacaaatttcaaataagtgattatttaaggaatgggatttgttttttaaaataagaaaaaacaatttttgttcagacaaacatactaaaaaaataaaaattacttattttaacaaataaatttaaataaactcattgaatatttgtttcttaatttttaaaataaattcacccaaaatgatgattaggggagtgaaaaatgagtgtgttcccttgagtccaaatccaaaaaacgagcagaagaaacagttgttgtgtctgaaagaatctctgcacagaaaacccaaccctgagtcacactcacttgctccacaccacatggccatggagatcccagagaagttggtaaagttcagatactattttctcggggcactgctcttctctcttatactgatggccccaagattcatgaccctcttcgcctatttctggccactcttcctctccacagctctagtccttgcctttctcttcttctttgctaagacttctttacactaatcctttcatttaactctacggggctgtaatctaacactaattatatttacttcttctcatgctaagttaagtcatgtgaagtttcaacagatcaaagtcgctatctttatttcaaaagtattaatttaaggcgatagttaaatatcagtgaaattaatgagtttagtctacaatatcatgaatcaaaattttaatctcgtagaaagaggtgtgtagtgtacatgtggtgtcggcctcaagcatgattgtattagtagaaaactagtgaaaaaatgtcggttcatttaattaatgtttaaaaagttaaattaatcgcaacgagaatgatggtttttattcttaaaaatatactaatgatacgagggattttttgaatatttcaagcccaaaacagaattttactcgattttaatttcttataattatcactatcattggcaagctggcagctttcttttgtgttttgttaaggataactataactatgtcttgacgggccattttaacggttgagttgtgtactaattaatgttgttataactctcttagtttttccttaaaattattttagctaaaatatgaactgaaaaatggagttgcgactgtggcagagtctttttgagtgatggcagtgtttgagtgagggtgtgatcgtgaatgatgagatatgctcatatgccgtacatgttcattgacattgttcatgaaaaaaatcaccatcataatagtcaaagtttagcatctgtttagaaatataatttgcacttttcaaagttgaaccaaacaccaaaatttttaagtttgatcagttgctaatttcttttaaaatttaaatagattttggttgtaaattattttgaatagtattaagtaagttaatctaaataaagtgtattctttaatggtgggaatataataatcgttctcgaaagttatggaaccgtcgtagtcgacaatgcaccatgtgccatccatattagctgctgaatgttcatttgtcaattactagccaggggacagaattcagatgccctgaaaaagtaatattacggggagaaaaaaatataatactattaattaattaattctaaagtaaatactacaatttttaatccaaaaattgttattttaatgtggtattatctttgcatattgtgaatcatcttgttttgaagggagctaccttctgctatccactccactagtatatttggtaggacactaattaatatttgtttattttataatagatactcttttcgcttgagagattaatataagttatactttaattcttttgcatataaataaaccttttcaaattgacgaataaatatgaaagtgtgagcctataattaatcattattgttgatagttattattttttactggtgttttggtcagaaaaaaaaatataaatgtgtgtttcaatgatttttttacaacttaattcaacaattaatttgtaaaatctaaatattatttaatattttagaaaataaagtaaagtcttaaacacttattattaacttaaattttttatctaaaatatttatctcattttataagatcacaaaataaaatgtagatgtttaaaaaaggctattaatgatgttgagaatcgccataagaaaaaataatctaaaatgttcatttatattaaaactcatatataacatatgtttatcttttaatgaagatgtatgtatattttttttaaaaatgaaaaaatatgtaatttaaatatcgaacgtggaaagcgcaatttactctttttagtaataatctgttaatcttacactgaaataacccggtaagaatattttaaaatatttaactttacttaaagcgagagatgctgactcacttggagggagcaatgatattcatgcaaacaaaagagtttttgccaagctgctaatgtcagacaccaaccaaatttgatatgataagattgaattgaaacaaaaccaaatttattagtattttatgtacgaattgtgttgaatctatttatagctatttgtctttgcaagtgaatcggattatatgtctttacagatgggtataatcgtgtaaaagtgatgcataactgatagcataggagacaatgggtacgcaaatgccattatttttaagtttgaaaaattcgtcggtgatgttattggtggaccaatatcattttttgaaattgactgcagtttgcaaacaacaaacaagccaggaacctttctgatcagatcatatataaagggttaaaaaaccagtagtagtagataacaactggacaactttaacccatgcttaattttttataataatttgaaaagttgttttttagaaaataaaagtcttctaccacataagattctgaaaaaaaatctctcgtcttttttattattattgacgaaaaaagcctttttggatataaaactttaaacaattcaaacaattcttaaaggaaatttaaaaacatttttgggggtaaaattgatccaaactttggctgatttttaaaaaaaatacaaattaaataaatatttagcaaaagggggcgaattcaaaattatttaggaaaatggggtaatgcaacacgcccagctggggcgtgtataccacccttgtaacgcctctctttgctctctcgtgcttgattgattttagatgagatttcatttctgctttgtatttgaatggttttagttgtaaatttttcacggaaaatccttttcttcttgctctgatttttcctatcgtttataacatagacgattttccttcaccgcgatttatttaaatacagtttatcaatacaaattagaatataaaacagtccatgttacatgtccataaataaacggtccaaatacatatcataagttacaaaataaaaattacaacatctttacttcatcttcaatttaacatccatacacatcttcaatccaacatccatgctcagctactattgttcatctgctcgcccaacagattgggatcatcacaggtgtcaaccaccgacacaaaatagggtaagcatatgataaacatagtttgaataaaacatatatagacacagatggagaaaaccttaattagaaaaaccacataacttatacagtatacagaacaacatacatagatccatcatgagatgtatgagatgcatgctcatctttttatatgatgcatgactgagatcccagcttatcataaaatggtaccataatcaacatagtttcacccactctagtgaaacttccctccactctgaggggtcatagtcaaaaatagtttcacccactctagtgaaacctccctccactctgaggggttagagggtaccatagtttcacccactctagtgaaacctccctccactctgaggggtcaaatacagatgaactatgccatgacttgtttttatttcttatttacttttcaccatttattttatttctcaaaatctcagatcagatagttccacccactctagtggaacacatcacaaagctcaacatctttgaccattcagagcatatacttttaaacaacaaatcatcatatcaagctttacataacagccatatttcaacttcataaattcctcacagataaatcatagtttacatggaaaattccatagaaacactcagcaacacatgggaaacactcagcaacacatgaaataatacataactttcattaaagcaaccaaccacacaaatataattcaactcaacaacaaggattcaagccaacattattaaacatattttgttcattgtgacatattatcaaacacatagtgtgcaagctttaaatcataaaattctgtaaagaaaactatttaaatcttaaatttcctaaaattcaatataattctagaataacatggttccaacataattcctagcataaactagacatatttcaagaattttcaaaacacttttaatggaacttataaattttagtagaacataactactttaattttagtaaaatatttgtttttcttctaaaatacctataatggactcattcattaagttaagctctaattatttatatatcaatcattctttaacctaaaaccaagtcatttatccaagtaatcatgttcctagcaatctttatttctttgagacatttcatcaaacacttagaatacaagacttaatcaaatgaagcaaggaataatattcaaactaagctatcataaactcccccatacctttgcttttccttgccttagaattggacagccctttgtttccttatttgaatttgaagaacccttgctcttagaatcccttggcttttacgtgaggtattaaaggtgaaaggctttagttttgtttttggtaaagggtgaagtagaaaaaatggaatggaaggctttttagagtgattttgcacgtcctagctccctcttggagctgcccattttcggttccactccctttatatagtggtcttgctacaaaaatcatcttaagtcataacttttgatcgggacgtccgattgagacgaaaccggtggccacgcgctcgaaatcgagaggaagagccgctggcaagttcccaaaggggacttgcccaaaaaagtttcccaaacgaggcctctaagtgcctcaaatttgcgatttagtcttcggagccctaaaaaaaatttctgttctctggtattttgtctatccaatcagtgaattgcaatccattctttgtttatctaattacttctcttaatttcgaacgttttgacataaaatacgtcttcatcgaatatttctacgagaaattacgtctgttcaaagttatatacaccgtcgaatctacactacaattttggattatttatgcatttgttaaaccaatgtggattaattaactgttggatttggttaattgtttagggtttagggcattgggttaatgattaactgttggattaggttaatggttttagggcattgggttaattgtttagggtttagggctaaggcgtagtgtgtttggataactgcatagtgttgatggttttagtattaggggtttagggctttgggttaatgattaattgttgatgttggttaaggggttgggttttacatagtagtccttgtcatagcgtgatttgattccgcaagagccatggccacaagggttactctgagagtagtttgcgagaattaaagggttactctgacgaccatgagcatgagctgatgaagaaggtgaatgggagaaagacatgatcacacatcttctttcttggtctgttttgcatcttctctgtgtatatgatgatggacttggcacaagtggaaataatgtacgtcaaggttcttgcttttggaatgttttagtattaatagaagtgtactatgaatatcagagggctgatgttacatcttgtaaatcaaatttaaaatttgagctgtctaaacgacacttttgaacagacgtaatttctcataaaaatatccgatgaagacgtattttatgtcaaaactttcgaaattaagagaagtaattagataaacaaagaatggattgcaattcactgattggatagacaaaataccagagaacataaattttttttagggctccgaagactaaatcgcaaatttgaggcacttagaggcctcgtttgggaaaaatttttgggcaagtcccctttgggaacttgccagcggctcttcctctcgatttcgagcgcgtggccaccggtttcgtctcaatcggacgtcccgatcaaaagttatcgccttccgtaatatacgaaaaaaccgcgaaaatcctaagtccccttttttgcctgccacgtggcgccatgggagcaaacacgccccatctgggcgtgtttaaacacgccccagctggacgtgttgcattactccattttcctaaataattttgaattcgcccccttttgctaaatatttatttaatttgtattttttttaaaaatcagcctccaaactttacttctataattttgtgcactattaatagttgctcaaccatgaataatagcacaatttttcatctgttactcgggactaagtattaacctcataaagctttcgtaaataaaacgtttaaagccatattttttatttttggattattgtgttatttgtatgaaatatttatttattgggccatctctaataacgtgatattgataattaattatacgaaagtgatttgtcaaaaaacaaataaaatgtcttttgttttcaaaaaaaatttaaagtataaaataattgacaaaagagaaaacagagagaaaaggagcaataaaaaaaaatctttattttttgttcatgtaatgatgataagattggacttgtatttatattaacaaaaattgaagaaataataaaattttgttcatgacctagttttgctggcacaatccaaatgcattgatgcaacacattctcaattttttttttttatgtgtcaacacccacccaaaaaaattacatgtaataacttgggttaaatgtgttgttgatgttgatgttgttgaacctccaaatccgtgccccgagctcattctacttgatcgaagaaaaagtgtaaaccaaggaggaggaaagtgtgttttgaattgaatgttccaagttgatctatgtatattaagctgtaaaatacaaaagactctgaactgaagtgtaaactgttaagcttatatacttacatgatatgatatgtataagaagctcctgatcaagtagtcaataattcgatagcatgagactgaccaataagcgccagtccgttcaagaaatttcagattttccatcctcatcaaagctctggtgtggtgtgcattacgtgatcaaagtggaaaataagaacactctgcaccaacttggtgcaatgtaatgtgttagtctaagatgactgagcaagagttatatcagaaattgatagtgtgccagaatcatcaacatcaagctgtttaaactcctgcatcacaagtgatatatcttcttgactaatcttccccatctctttgagcttataaataacgaattccgcagccctatgagaaacaaaacaaaagatataaaaatgaatgaagacatgttttataattgatagtataacaatatatatgactttgaaagaatgctcaactaacccaacagtcccatcctcatcaagatctgcagcctccaaatctaaattggtcactttccttgtaagtacccacttgacaagttccttttgtctgatttcagtgtttagctcagcaatgtagaggaaaagctgagctaaagtaatagtacctgtcaatatccaaaacacagcaaatgttcttcctgcttcagttgagaaactttgatccccataacccagggttgtaattgtagaacaaacacagtagaatgcatcaataacatccaatttctcaaccgtgaccaaaaaaattgtgcccgcgatgatgagaatcaaaagaaggaaaaagactagaaataatttgtatcttgttttattggtctcaacctcccttaaaatttcagttgaaccaactttttggtgcttgcgcatggctttaactagcaaaaattcctgtttctcaactaagtagtctgctgctttgcttacaattagtccaatcaatgccatcccagagaaaacaaaagcacatgcaagtagttttgtaaggtggctatttggcacaaggtctccatatccaacagtggtcattgtcacaattgtaaagtacaaagcatcaagaattccatctgttttctgccccttaatctggttcctgacaaggtagaagattaaagcacctacacctaagtagactgcaagatagatagccactcttttaaagcttggatgtaaattctgaaatatggacgcactatggggaattgattcattgccatttgtctcagtaggaacaatttctgcttgaggagcacttctaaagcgggggagccttctcttgtttagctgctgtttagtcttttgagtcgcataaagtgataccggcagcaagggctcctttacaccattgttggccatgcagaggaatttagaaaacaaggatctgcaatataggacctgattcaattgcaaaacagttcaaactagcaacatcagtcaaataagaaagggatgtaaatgaacatccataagccattgttagacttttaagtatttaaatgatgaagcatgaaacataaattcatccaaagagctttcacaaaaaaataaaccagtatgctcaaatatatactataataataggtgccagagatcaatccaagttctactttgagcttaccaccacaaatgcaaaatgaaatcatttggatcatcacttacaactgatacgagccatatggatctcctaaattgcgtgccttcatttaaagaaaaggcagaaaatgcatccatttcttcggagctagtgactttgtaagcaaaataactaataggccataaaagtagcataatagcattgaaatacaatgaatttgcccattatgctctacatgccaaaaaaataataatcatagagcaaacgcaactagtgaactaggacttcctatttacctctcaatttcttaacctcaaattcaaatccattcaaattctaatgaaacttacatcagcctcatcatattgaacattcccagtttagttctcattacaaaaaaaaaatagaataaaagggccattagtcatctcacagaatttcaccatcacaagtattttcctctattcatgggcaatcctccaagacaaaaaagttcccataaacagtgacccaaaattacacaaacaagtcggggtgtatcccttcaaaatcgtaacttgcaagagccatccgaaagaaatgaaatatggttgaagatcacaatctaaaagttaaaaaaaaaaaaaaaaaacctccttgactaagacttaagacaataatgatgcattcaatttgggagaaactaaattaataaagtggatcagagttgaggacaacagttaatacttaaaggttgatcatgtgaaagacttatccaactgcagttcatgtcaaggagcattagatttccagaaatagcaacagtgctacacaagttcaatctaacacttttttgtagagaataaatctgcaaaatttaaaggtcatggatgactaatcaatagcaagtgaacaggcaaaagagaattaaaacgaaacaataagcagtggaaattccaatcaattatgaatcgagctagtaagagaaagacatgtgttgaactaagaagccaagaggaaaacaaacccatcacaataacaacaaatgtaattcgtaattgcgaggaaagttctaacctttgaagtggtttgttgttgttgctgaaggagatgagatttgagtatggcgaaggcttctgaaagcttgtgattcaatgcaagtggatcccatatgatctagcttctccataattaatcatgaatcaattccgcgttaaagagattttgtttatttaacataaaaacaaataaattatttgaaaaggacaaaaattaagttcccatatatgcgccccacttggcagttgttctttcgagtttcaaccatattttgacttcttttttaaggcttgttgtcggaaaagaaaaaggacatggtttcccatttattcatggatgactgccgactataaattgtttaattatattttatttaacagtaagattttattaaatgatatttattttaagaatttaataataaaatttattaaaatgagacaaaaggaacctacttagataagacatactaaaagatttattaaaataagtataaataaataaaaagccactaaatactctgaactaataacatgttaataaaaaaaattataaattataatcttttcaaagtaatatttacatttgaaagatatatatttatagtcttttcaaaattttgatgataatcatgttactaatttagattttacaattgcaactaatcagcctaatgtatatattttttaaacatattttaaagaataccaacttaagactaagaagttttaggactcgttttaaatggttattcagtgttgtgttcacatatgtttgcaattttctataattaattaattatgattaaaagattgttgaatagttcgtcaaatgaattgtaattgtatttttaatcaatatttttatattcatcatttttataatcagttaaaatacagctaatcgatacaaatatatgcacatatagagcacctctatcacaaagtgttaaatagaaataactctgtcaacaacccattttactagatttgaccatttgagagcaaccataggatgagagagaaaatgtttgagttgctttggtcccttggatagcaattgttctctacaaaaaagtgaggcccaaaatttttattttgaataattagagatacacaatatagaagagtaaggtatttcaggacatggacttggataatggataatgtctagcccctactctatccaatctctattcatttctacatggtgggtctttctttctccatttttttttcgtgtttttccttttgattttttgttttgttgcaaaaacaatagccaacagggcataagatgatctaatttgggtatattgtgagatacattaaaaaattggttaacttttttatttttaaagttaaaaagataatgatatcaaagaaaaatatgaacagctataaaatattagtattagatacagtaattaataacccaagtcccaagtgagttgcttaaatataaatgttgtttcatacaaagcaaaataaagcaatgtatgtaaactatgagaaaatagccaattaccaagtgtcaatgtgagtaattttttaaagtatcattggggccaaattaatgttagagggtattttatttttaccggaataaattttaaatttttatctaaaagggataaatcataataatttattactgacttctgagttttaaatcctacactatttactatttttattttttgttttttaaactgaagtggacgtaacttcgtaagaggctaggaagaaattggcggtaaagttgagcaattttttttatgcaaaattaaaaccttgatccaaaacaacttaacctgttcaatcaaatattcatatattaaaatgacatactgatttttgtttcaatgcagatcagccagtggttgaccaagcaattaatgatatatgtattcttatgcaatgcaatcaccgtaaccttaatacggtagtttttcgcactatcgtttttgccatttttcttttggtatggctcttggtggattttggtgaataaaacttctatctgagtttctgatatgcttgtttttctattatttatttgtttgaaacagaaagttatcaatgtttaaggtttaaatgtttgggatgcttatatttcttttattttcattttttgtaggtttctgcagggaacgggtacaaaatgagatcaccctcaatcttggaaaaattcactttgttgtcagaattttcttaataataataacagtagtagttttattttcacatataatactgtttcatgaatgtgtgtacatttttgtataaaatacaatctcgccactggcgtgtctaattttttttatgaagttcaaaagacacgtatttttatgagatcccctgcttttattcatattataattataatttatgatagtgagaaaatatgattccattaaacgtgcattattaataaggctggcatatgtggcattctgtcatcaaaattctcctctactgctgcagtagtaattattaattaattttctcaaagctgatagttttgccttttactgagtttttcatattgtaatgatgtgtgctaatgtgtttaactggcaagtggtaagacttatggatcaagtttgtttctgctgtaggttaattatgggctggataagattcactgaaggagaaaggatatttgattgcataagttctcccaacactgtaagaactaagaactgatcttaatgtagtaattatttttaccatttaaattatatgcaggcatttggcttttctgcaggcccaccatgttcctgttcacgttgaagaagttcaaggtatcctattttctgggtgaaaatactgcaatcgtttagtttccttcttataattttatttggtacttcatattaacttaaaatgcaaagtgattcgaaatggagagaaacgttgcttaaccttgtgcatagatatcattagtgttgctcaatacatattagttgtggagaaagaatcaggtaagcaaatgcttttttgttttggagaaaataagaggaaaaaaagtacaagattcttccccaacttacttcctattgaaaagaccgtccatgttgaacttcactttcagttttccaaagactagcaaacgaccaattctgcaatgcaaatcgctgtattgtcatcactgtaagcaatcttctgaagacattagtttcgtttgcaacaatgtttctttgtttgaattctatctttatacagggaagaggctacccggatattcctacaagaaggtgcgaacttttgttttcatttacttgccagcttgccttttcatattgcattgcgaatgtgtctgtttgtatcctaacaggtttttgcggcttctggttgagaatttgcgtctacctgcttattgtttggtagattgtgatccctatggctttgacatcttgaccacttacagattcggtacaatggttagtatttataagtttattaattaagatatacatcaacatgtatatcattatagggatctgaatataaaatgtacaggatcattgagtcacttgaatctctgtaatggctgagttaaagttcatatcctgcctgactaatctattccccacgattatgttagcaaatggcgtatgacacgaaacatcttcgtgtcccagagatacactggcttggagcttttccttctgattctgagagatattttgttccaaatcagtgtctccttcccttgactgctgaaggtaaataaggatattacttgtaatgcgtcagatcgacctagttacatatctgatcttataaataccgtggtctcaacattccttctagacaaaagaaaagttgaagccatgttacttagatgctaccttcaaagggaggtaccacaatggaggtattgttcatatacattccaaaacatttgtctttttcttcaactgtgtatcttattgtttgttatgaaggttggagctacgtacagttgatactgcaaaaaggagtaaagtttgagattgaagctttatctgtgcacgcattttcattcttgtgagaggcttacataccaatgaaaattgaatgtaaattgataatgtagcatgttggacatctatgtgtcaagctctgtaccagcaactggactagggcataatcagtacatgccatttgttacgcattctggaagattaaacgatttcttgctgactcgcgtcccacacaaagttattactcgtgtctttgttttgtgttttcgaaattccgcttgttttgcaaatggtaagtttagttgtccgtgggggaatgggcttattggcatgtcggggtagaaatgggtctgtctaggatctttgaggcaaatttgtctacccaatttaaaggttttatgaacatcgaacagggttttatgttataaaaaagagagggttttataagcaatatggaacgtaatggtcttcggcatttatttgctatgatttggggttcatgccaaaattaaagtgaatcctataataattatgtactcataatgttatccttttctcacgggttgctcataatatcatctataaacttattaataattttctttcattttttttgtataataaatttatacaattttgtgtataaaaaaaggaaagatataaagaagagaacaagaagggtggaataagataattaatgtaatagaaatagagagaaaaaagtgttaccaaaaaatgttatacaaatagtatcctcttattaaaatacgtacaaaagttgtggatgcacgtaagtgtgcaacacaagttagaaaaataaatcctattaagttttccgagatatacttaagttggccttttaacatgctttgttagacttaacatcacatatgtagagtctaccgatgctagaatttagaacatctcagaaaacactagtagttactttcaagagtcccccaaaagatgtcgtgtacaccacgtgtgcactccacttagatttctattcatgtatttgctttcaagcgcattattgacataaaatctgtgatgtaaatcaattgcaagcatacacctcccagttctcattctcttcatgagattaataactctattttcaaggggctaagccaccgaattaaaagaccccacttcattattttgaatatatatagaaatgcattattggtatcgaagggacaatcatatctactgtcatcatcaaggtgatttatgaacacaacttcatatgtttagttttacacatcaaaagcgacttcttctaagccaactaatcaataattttatctgtgagaagcacccttgccacatgatatattagcgctcacttggacgctcatcttccctttttttatgtaacaatatacatgcacttttccatattcttcatcttggatttgctttgtttgtattgtattaattattgccttatttatgcatgcatgaatcggtactttgtaggacacaagaatagtagtttttatctagaaggaagatatctttagttagactttactactattatgtagtttttgtctcgtgagagttagtcttagtcccaccaagtttggcagggtctttccagatctcacccaccttgatatccgctctacagagagaaatatcaaacaaaaaacctttcactttcgagactgacttcactttggtagggaggatccacttgggacttagcttcatttgatcaaaatccatttaaggcagtgaaaatgaaaggcccatagttttgtgtgccttatcagtgtaatgacatttatgaatttttggccatatgtaccatagcatgtaattgacaaacccttgtgttgctttcagaaataaaaaaacaaaactctctctattcttatgctgttatactaacttactgtagttgtttcaagtctctaagttgtactattcccatataccatgcgttgtccttgttgtctttatacatgaatagatattagcaacttgatattgagcacagaagagtaatccctcaggttttaggccgtctaggaccatatttctcctggtcctggcacagatatcaatatgggatggacaacagagaatatcccagagctgtaacatggtctaatgggtttgactttgagatcgaagggtccagaaaatggtagtgctgagttaaactttcgggtgaagttacattttatgtgtgggaatgaaggtgccacatcaaagttacatttttgtttacagtgttatgcaaaagtgaaactgtagataaatcatgggggtatctggttgcaaagaaaaaagttattgcatgctaagtttgattgatggattctgttccttgcggatgcattatgcatatgaaaatataggcattaatatcacttaacaaacctggctatacttaccactcagaaatttcacaacagtgtcttgttataggctataattgtttacaaaattaatttttggagacaaaatgcctatttaacacctaataaaagacacaaaagagaaaaaaatatataatatgataagtgatataatgtaataataaaaaagatagagagaaatgatgaatatttataaaatgtttgaaaaagttggatgtccagatatcattgtttttgctcaattgtttaagtgccttcaacttcaagagtattatgttacctaatagcgttaaagggcaaaccaaaccaaatggtgtgtaaatacttgatagataagtatgcgggtagaaattaaatcttaagtgtatgaaagaacatatattagaagatgttagttttttaaacgaatattaaatcataccttgaagaattaatctatgactcttgactagagaatttcttggattaaattaagaaaaacgtttgagatttgcgggaagtttttgtttatcgaatttagaaagatttcccaaataagatttctgtatcaattctttgaaactgaaagaactgtgtcaactatgtattgatatattcctgggccatcttccgatttgatatttgtgaaacttcactttcataaggtcgtcttatgctgggtgcatgcaatcattgacttgcatttgctcctagtcctagccactttgtgagacttatccatacgtgcttcaatctttctaaagcataaaatgtgaattttccgtgttggatggaagtaattaaaaagaataataactaaaggacagtgcgttgagacacagtatcgttcgttatagataaataactaggcatggcagcgggactcgaacccgtgagtacctgtccgaatccgccccgattttaatagaaaaaatcgaatttttcgggattgggtttggattcgggttttccccggtagccaaaagcaggggcgggggcgggtatggggttactgatacccgccccgcccccgccccgtaataaataatattaaaaaaataaaaaatattattttctatttttttaattgaattgattgattttgttttataattttaaaattatgatcccatattttaaatctggatttgttattattatttttttgttacataattaacttttttatccaattgttcaataaaaaaatatattatttttttatttttaaaattttaattaaatagcgggagcagggggtggggcggggaaaatccgacccccagcggggacggggatgtggatgggttttaaaacccgacggaaaacgggggcggaggcaaagagcggatttgggggcgaggacagagacggagaatgcaatacccgccccgcctcattgccatgcctataaataaccattcataaatggctaaacatgcaagtacttacaaaagacctggtttttggcatagtatgcaagtatcatactttataataaaaaaattcccatagctactatgtgtactaaaagtgttcgatcttacgaaatttatacaaatgatcatggtttaatattattgtagggtgtaaaaggtgggtttctgacagacattaacaacgatagtaaattgtagatttcatgcatgcatacatcttcataataccacttatcactaactaaaattatagtagctctcacaaaagaaggaatttaaattaaattaccgtaaaagtaattacatttttttaagggggaaaaaggcctctaataaaccaaatagataacttaaaataataataatataaataataaaatcgtacagttttgtactttgcattatctttcttagctataagccagtacctaactgatgggctgacctgtatgaatcagatttgtgatcgtgtaccatttgctctggctaataaaatcgcaaatcattttcaattattcgtaatactgttggatcatacagaaaaagactgtttaagttcaaccacagttgaacaggttttcttcgatctagataccacgtggtctcatctttcaacaactaattgaacatgttgctataaacatagtatagtactgacattcttcttaaatatcaatctctgttcttaaatcacttgtttgtttgcattcagattactaatttttctttaataaaacaattggaactatcaaatccactctcaaataatttctctcttgcatgtcaagctacgacaaaatactgttgccagagataaaatttcggctgaaatgttacaattttttttatcaaaaaatacaaaataattttttttttccttttcaccctattaagatcatatcttatcatttaagaacaacagtatccaaatttatttctatttcgatgcatgacatcatgttattaaatcctaacagtgtatcgcatagattaaatgagtttagtggaaggggatagttttgattatatactcaaactgtgtcatatacgcgaatttacttcattaacattgtgatcatgtgcttggtttatgacttcaatttaaacaaaattttcatatccaaagcctgctctttgttgctaccaatggcagaaaagcatagaaataattttggaaaatttcaggggatgcatactacatacaactaaagtacaagaaaagtggaacataaaaggagaaagacctaacaaataactaggcctccctaagaaagaaaaaaaagaagaccatggttgttactaaatcaaaccatgactaattgccgttgagcttcaattcttagatcttccttcatctttcgaatgaaatcttcaaactttttgttcaactcctctgtgctcaacatacagctttcttcttcttcttctacattttcttcctcatcttctatgctttcttcaatcagaatgtaatcagtttctgaccctttatcttcctcttcatcatctacatccaattgttcagtttcttcatctagctcctccttctcctcttctttcaaaaccaagctactttctttttcttgtccttcatctaccaaaatgatcttctcaatgttttcttgtacttcttcttcagcacagttttctatttctattacttgctcaactgcagtgttctgttcatcaggctcactagtttgttcctcagtttctactatctccaacattagctcgttggcttcaataacccaaaaccgagattgtgaaccatcatctttaatatacgtagaaggcttattatcatgacaacaactagacctggagagagatttagttataccaacaaaaacaaggataccattgcaaagtagaaacatggagttcttgtctatgttgtgtgtataaagttggaaagggaatgtagagaaatagaatttgaagtaatgtaggaaaacaagcaaggaagaaggtgagaagatgaaggaacacacggatactgaaacgaacaattgagtaagcttaactagatagtaatgagcttttaggtggtgagtcatggttgctatattttggtttttaagttgataatccatagtgtttaaaggaaattaaggaaatgaaatgacactaggaagggttggtgacacaggttctgtgagatggtgtggtttggtgtatgagggaggcctccttatatacaatggtggggtgagagattctatttttgggtttccaaaaatgcccttggatggaaaattattgtgaggcagatagcatattaggctcacctgctctttagagactttgtcaattgtcatgaagggtagtatccagttgtcagagtactatttgtaacagaaattgacaattgttttcttcaagttcgcctgtttgaggttttctacatgtcaagtggaatttttcaaagtaggggccatatagagagagagaatgaagcttaggaagacaatcacctccaaagtcacctcccactttaatcccataatataagtttaaaattaactgctcaatgcttatgtactgagtaattgtgactgttggatacagtgagtttgtgtttcagcgttccctatgtgagttatttttcatttccgcgtcaaaaatttaagaagatccaaaagccatttagatgcttcagattggacgtggattacaaatgacaaaagttaaaccaaacatgcattataataagtggcaacaatgatcaattgatcaaaccacataccacctgatacgtatattatatacaattaagtgtggagattaatttttttatggctaaattttactggatcttaaggagtttgttgatgcagaatataattgagtctgatcataaaaaagattctgagtatggtccactcggagacgggtgatatcagtttcagtcttcgtctctggaaattcaaaaaatcggacttctctttcctcctcctcgaggatgatggatccgtgcgctttccagaggcgaaaactgaaactgatatcacccagctccgggatattaattgttgttaacaaaagacctatgattcttttcattttttcattttttttaactatctaattcaccttatattaagcttgatattaattgattttaggttattttaatttaattaattgtttcaagttcgagttcaaaaatgacttggagagaaatttttgctttttataacttgatacaatttacaacatatattaattaatagaaccactttaaggttttaatgcattatcttgatgaattgttgcaaaaatataacccaattatatgcaattttgtgagatttatgcgaaatttttaactgaaaaataacacaacaaaactgcacttataaacttttttttcttttatttttcacttatttagattttctcgtgtacagttgaactgtttcgtggaagggttgtctgtttgtaggccaggccttgtttttgattgggcgggcctttttatctgttgattcgttcataaaaaacacaaccaaagaggaaaataaaactaaaacagtagaataccctaagcacaaccaaagattaagaagtccaaagcacggcttagcttacgaaataagaaatgatggaataactggtagccaaacagggcatagccgaagttgatgggtggttctacttgtttctgcaaagcacaagagcaaaaccctacttgaaccctttctttcttcgtcactgctcacaaacatcacaactatgtcgttgggaattcttcgatcgccagcgatttcattggcatcgaagcgattcctctgcaccaatgccgcttccgcacctctcccccctcctccttccgccgcttctcccagccgctggaacttcctcaaatacgccgtcgtcggcgctctcaccggaggcactgcctttgccggttacgcctcttacggttcgttttccttcatttccattttcagagtagtcatttagggttgatcgacagaatctagtaacatttttgtgtctgttttttttttttttcctttaagtcggtgttgtcactctgatgtgttagggttgttattgaatcattctgatctggaaatgacgttggttgaagattttttttttttttggaatgaaacatgcagcttacagtttggaagaagtagaagagaaaacgaggtcgtttcgtgaatcggccaagtacgctgccggtgatggagccactgctctcgatgtcagtattgaatatttctcaggctttcttcactttcattcttctttgctaattctatgttttagaatcatattgggggtttaaatatctaacctgaattgggttgatgagctggtcattggaacgttgtttcttgttatatgaaatgctctgcacatgctatgaatttaacgtttacatttgttcaacaaatttacttttggctccatttcattgcttgtatcgtttgcgtgactgtttcgtcgccctacgtcaaaatatacagtggttttcttttattgattttgtaaaacactttagtgatatcggattaaatcctattattttgcttcgtggaaatgccctcagtggaccttacttttacttaatgttggattctgcctggttttgatatgataatgataagtttcttaagtttaatgtatagtaaggtgacatgttctagtccatatcttgtgcagaaatttcaaggtttgctatactcaactgcaatgacaggtgtgttccccgagctttattccgtacacacttatcctgtattactgttattatgttcccttaaataagttgtgcttttgtttcttcacgtgaacttttgttcccctgaagtgttgctgttatatgaataggaaaacttgagctcgtcatttagatggttctgtatttctgttttgtgattttatgaagtgctctttgttatcgataagcatggacatctttttaattttactcaactgaaaaatagtatgtaaaggtcccatggggaaaacactgtttccattagtattaagtgcgacaaatgctaaaattaatagtcattttcaaataaaccataggtctgcccaatcatagtcattatatgcccctacttttgctgcagaaaaatattgcaaatggatgagaatgtgggatataagcatgtttgttgccaccacctttggagggtagggggtagaaaaggaaagtgagcagtggcaagaacttgttgtattgtagatgttgaagaagatcagtgcagacaaattagcattgtatgcacttcttggggggtgggggtattcaactcccaattagttatatatatgcatgccttagacctctgttattaacatcatgctgattcttttgcatgtgataccccagtgcctgctaaagcagtagagctttatttggatgcaagaaggctaattgaagaacaagttagggtacgtgcttgctttttaatatgctgatattggttttgacacttgtcatttaaaataaattatatttccttcctttgttttaatactgttctcttttgcttttttttagagttatactgaaccatacacagacaagctccttcctgatttgcttcctcaggagcaacatgtgtttacacttgttcttgatctcaatgagacattgattcactatatttggacggtaagacgtctactgcaaattcacccttttttgttggtagaaatttgataaactcctcattattggttgaaattcatgttgggtgactaaatcagtagtaggagactaggagccactaaatagggagtaagactcatgaatttcaaccatcagtaaagaatgtgttgcttacattccactttcctttatgtactttatgtcataaaaaatccattggatctctttttgtcttgcttcttgctggaggtccttacatattatagaggtatgactacaatattgaattttacttttatggtatgtaaagcgagatacaggttggcagacttttaaaagacctggagttgatgccttcttggaacatttagctcagttctacgaaatagtggtgtacacagatgaacaaactatggtaatctgattcttctctatattctgaatggatacttactcgtataggtattcatattcatatattcttacatttgttgatttgtgcagtttgtagaccctgttatagaaaggctggataccaagcattgcattagatacaggctatcgaggccagctactaagtatcaggatgggaaacacttcagagtatgtgtttatgttcttacattattctcttccagaattaattatatacataaatacctgtggaaggagtacaaccaatcatggcaaataataagaacaagtgccttggaaatattatatttttatctataaaataatagcgaagtaattttgcttacacctgaagaatataaaataaaagacctatggttttattatgatacttgatacatcacatgcatagtgtactagtggtgttctggatatttttataatgagttgttctttcctttttccattgtttgcttggcaggacctctcaaaactaaacaggaatccaggaaaagttctttatttaagtggccatgctttggaaagttgcctacaacctgagaactgtctccctattaaggcttggcagcagcaagatatagatgacacagctcttttggattttataccatttcttgagtgtaagcattccttaagatatattgaagaatgagttattgtttgaattattgtttttattttcacatcactccttgagtgtaagtccattcccttaagatgtgtttataaatgaatttatgtttgaagttactgtggtgactttttatgcttgtaaaagttgcattaccttctctgttatctatttgcagttgttgcccgtagtagtccacctgatataagaccagtgctagcctcttaccaaggatgtgatattccaagtgagttcatcaggcgttccaaggagcatcaaaggtagtatttaatcttttacaaaccttgaagattataatattttcagtatttccttaactaaattttgaaaatacaaaatttcagtatagaatttgtgattataacaaaaacataattaataacaagagaacaagtgaaatgcgctcttaagggaatttggtttgtttcaattcagttatgttttcactgatagttatgagaatttagtgtttttactgagttcatattggtggttgaaggtttcttttgtgtatatagctgacgttacactaatgatttatcctgtgttgtgttcaacccacatttttactctgggtgtttccaaatgatgcaggagaatgcaagaacaaaaaaatcgtggttacttctggaaatgagattcaatttcattgcaagttgatacaaatgatctttgttgagggtagataatgagattgtctgtttcattacaagttgatcagtcagttcatccaagattttgaagtcactgcaagttgacaagtgattaaattaaatagagaaaatgtagattttgttttacgtaagtcttgcatctcatgtcttgaaccattttttcctttttgcctattgtaattctgttgctggaaagcacttgttaattttggggatggagttctcaatggatgtttcttgcgaggtgatttaaccttgagtacatctctgcgcagaagaggttatggatgaccataaactaaattgacatgataaaataatttacttgattttgttgtttattttgttggaattttctgttctgacgccttgatctaggtacagattcttgattttgggcattcattgttatacagtgacgtatataagctatatattattgattacatatatataaaattagagataagatctattactttactggtagaaaattataaaatcaacaattattttcctattaatatctttcttttttatataaagaaagtgttgatggaggggggagactagggtccttttttgcccccttgaatctgtccctaatccccagtatcacacgacacaaatgaaagccctttaattattaatgcaaaattatttatgaaatagatgaaaatgagattgaaatttaacttttaaatactaattttgtttaagcatattattctgttttatatataactttatataaaaatttcaaataaattaaattataaagtgattttgtggcatattttaatttcataatgagacaacctcactttttgtttaaatatagtttataaaggtaatggttaaccttacttctataagagaggcatttcctttgcaaataacatgacaatgatagtgctttcatattaatatcgacaagagtaagagcacgtcaggagtcatacatataaaaaaatcccttgcaagataaagagtgagcatcaaaattgatcatttgggggatacgtaacatagtaataacaagcatataaactaataatgaataattgtcatgtaattggtgcatcataatgctacagtctgagccactggtctccatctatgaagctcttgtacaggaaaggacttgcttccggatagctgaatgattttgaccaaggcaccctatgtcttctatctgctcctcttcccttgcattgatactctgcaaacactgcagtcctgaagtaccatatatgcttagacatattctgcactatgaattctagaatggaataataatgtcatatttaaaacatagagaaaaactagcaacaaactttactattggttagaatgtattggaaatcacaatttgtagtttctaatgaattttaaccaataatagagtgtgttaaaaatatatgttagaaattgagttattagtacttggagcaaataataatactatcatacttcttcctatgtgaatgattccagtctgaccacccttgaggattaataatgccatccatattacatttggagtatataattcttgagtagttcccccatgctctgccaaggtatacactgccagatcctctaatactgcaccctacaaaagaaaaacccgtgtcgtctgttggtgaatccctatgatgtgctgctattgctccatagttctcagctattgactgaagacgacacttctgctccatagttctcaaggatcagaattaaattcaataaacttggtcactagttttgttttagtaacagagaaaaaagttcatcttatatttacctcatagagtgattttgccctgccacagataaaatcaacttttcctatgatgcgacactttaagaagtaatgatttcctgtgttgtccaagagagtgtcctgtgttcccttaatcctcactcgatagaacattgcttttggactgcttaccctcagtgccactccttgcatcccttttccaccagccgatgcaatcactgagttctgcaaccatgcacccaaagattggcatttgacatagtccaaaatgcacatgccttgtgttggaattggatttagtgcagtcacttttccacacattcagtacatttataaccattgaatgaaaattggactgactcagatttttaaatgtgtgttttaagttgattgactgagagaaaataagagtcgtttaaggctgaatggtcattttggtatctgaaagtgtatagtgattctaagttagtccctgaattcgaataagttaaaaaaaaaaaaaaagaaatccctgaaaataacttcttacatttacataatttgttagtttcaaatgttatcattaaaatgcagtttatcccttatatgtagggactttgcattttaatgataccacgcaggatctatatgaaactaacaaattatgcgaatcataaaagctaatttcgggaactttttctacatttatttgaatctgtggggactaatttggaaccactgtcgtttaatcttcacccaatagttctgaaatgttgaatgtgttgaaaagtgaatgcagggaatccagggtaccaaaaattgtgtgtccttacctcaaaagtgatcccagttgcacagaaataatctgagtccactcccactgttgctgaagcataggtgcccaatgctgtgccatttgggcctttgtcagatgacttactgttccaagtaataataggacttgcagttcgatttcttttccctataaatgatacataaggcttggtcacaggcacacgcactttttctctgcacaaattgcatatacacaaaggataaaataacataagtcaagtttttaatgataaaaaaaaaaaaatgtaagttcaaggccttgatgactcatgaaattttaggaaaccaaataaatgtaactgttggatcaaaaacaccaaccaaacccagctccgttaccccaaaaacaaaaacaaaaaatgtattttttcaaaaatatggattaatcaaggcaaacaattaaaacaacttcttttgattagaactgaataataatgacacaatagaatctaattgttaatccatgtattttatcatcaacttgatgaattaattttaaaatataagattttttccattatagcagactgtttagaagaatttcctattttttcataaaatattttgctttttcctgatactcgggttcaaatatccatggattagatgtttgtttactggcttcatataattcagaaaaaaaggacaaaacttagattttggagttgttcttcgatcaaaatcagagtttcacctcaataattcaagttgacaatttaatcaaaatctttagcatatggattactgaaattgaaactccatttataataataaaacaacacccaaaaagtagtatgaaaaaatatgcagttaagtactgacctgtaaattcctggaaaaatgtaaattttgaccctttgtctgttattatcaggaaccagattcacagcaccttgaacagttttggaatgtcccccaccattctggttaacagttataacttgaacctggttatgggacgacttcacggccaacctttgttcatccacctgcaaatcttcccaactaatgtaatttcgaacagcaccaccttctgctaaatccaccacctgagcccaaatcacgaaaaccgaaacaacaaacaagaacaaaactctggaagacaccaaccccatcatcatcattattgcgttgccacgcaacgaataagaaactcagcatgaaggtttgtgtatgttaaaaactgttgatgatgtgttattattataggagcaaagtgggaaaaagaaactccaaaatgagaacaaaaagcttgtgttactgatgaatatagtagagtaacggttttagagttgaagcgtggagtagctgattgcaataaatatgcgagcgttatatatggtgataatatacatacgtctgttccaatcctgatatattaggcatgcatctgttgatgttgttattatatatgaattataaagaaggagagtaatagctaggaaaataaacgtggcttttgtttttttagtttaatagaagcaacataaaaaaatcttttttttcttgttttaagaaaagttgaataacttatgagacttgccaaatgcatcagtagaaatagaaagagtgttgagtaactgagagtgtatttatttttatagaagaagagcggttatagattcatggggtgcggatattgggtgcaactgccccccactatgctcttctctttgttttggtgaactggttttggatctttctctatgcatgcctttcaaatgttctttttttccctcctttgtgtatatactaagtgcaaaatactcatgaaggcatggaagttaactgtgaatattttttttttttacacagtgatttgttttaaaaaaaaaagataaatgcagtttgaagttaaaatgaaatgttataatggttactgatttttaatagttggagataaaaatgtcaaaaaaaaaaacaccaaatagagttattttctttatgatagttatagaatcataaactactatgttaattgtcaccacttgttcaattttaattttcgtttagcaaaaaattattttgacattttgaattaataatgctatgaatgatgagattttggacaatcttgaatgtttgattttcatctggtaatagatgcactatgagatagattttttaacttatggttcagctacttctaggattaatgcgaatatttaagtgtttcctgcagagaaaatgttcagttcatgataatgattttaatgaattaagaatgtggtccctcctaaacttttgtgtgggctgtgacaaagtgacacttaaaattattgcaattgttttgtatacctatacctatgagatgagacgatgggatcaaatacataaaatgcaagtgaaattatttcatcaatgtaaaaattaatagatatttatggtcgtggttgactttaatatattggaaaccattttaaattaacgtgtgttgagcaattgtcctttctcgatcggggagtggacacttatttgatttttgggtggtaattaacatattgagttatttaaaagttgatcagtccattcattattagttaattacattatattcatatcctataattttcaattaatatttaatcaattattgggttggattgcacataaagaaaatagattctaatagcgtgaatccatttctttaaagtggtagtgaggaacctccacctgctttattagaaaacataacaaatgatgggattgaaaataaggacaataaatgcagctattgtataatcatagaaagtggcggattaaaaaaaaaatattaagtgagggttaaaaatattctgatattttctcaaataaaaaattatatgttttattaaaaatgataataaaaaaataaaaacaataaaatttaaaaggataattaggtaatggaattaattgtttcacaaaaatatttttttatttgaatatattaaataaatattttttactcctataaaaaaaaatagatgttgtcctcacacaataattttttaacaagataaatatgaatagttataaaagataaaaaaaaattgatattaattttatccactttagcttatatgtagatatgtcactaatcatagagagtttgtttgaatataaaattagaagtatttttgagagtttttatacgaaaaaaatactatattttcattaaaaactttaaaaaaaatatttctaacttgtattcaaatatatatatatatatatagagagagagagagagtatacaagagttagaatataaaaacataagtgcgctgaagagtgacgatagtgaatatcaccttaatttttacaacaccaaaaatcatttcaaattctcccttcattacagtccttggccatttaaggtaaaaacaattaataagcttcactcatgagtcacgagttgatggtgtcatgaatcataactctctcacacacacgcttccatcccccgttatattataggcaagaagttgttaggctcatagattcacagatatgaatttgcttcatttacttgttgtccaccgtttcacataagaaaaataaaggaattgcttattaagaacagtaaaaggctatggataaaggtaccggaaatgagagttagaaaatatcaaggaatgggaacttctgttttatttggttccggtgaagattcttggaattgtgcatgcacatatatatggaataaatttcatgttaataccgtgagaaatatacatttggtcatagaattatatacggatgtaaaattactatttaaaaagttttgaacaagtatcttataatttttatgactcaaatatagttttaaccaatctctatgactttcaaccaatgttattaatttttttttcatatataagttaaaaatttaaacatgtgtgacataaagattaattcgagaccattgacaagggatactctaagaccacataatgatttctccagcaaggagtctagattctttctggcccaaattcccctctagcaatatcttgcagcatctcagccccttcattgatcattgtacaacaattaaataagacagaatatagtgactggttttgattttaactaaagagaaatttttgatgaagatgcaggagaagaaccatattgcactaacggtgttaagcagtgatgcttaaacaagctttgtgcctaatagttgctcccaaataaacattgttcttatttagattagaacccatgtaataagcccaatggagacgtccttggactcatcccacatccaactcctgcaaatttcatctattgttgttataggaaaaagattagtgttttccaatctttacttaacacctatatagaaagagagaagagaaaatgatgtatatatgcgatatgatacaaagaaagacataagtattaattaaaatgtatactatgtgaagatgttcacttatcatcactcttaattttcaatatatctaatactatataataagagaacgaccttcttagccacaagtttcagtaaatattttccaactggatagactgggggttttgtgtaaggaatccagtaaacaaattgtcatcagattattaacaacaggagggctcaatagaggagaaagcattcacacattgatttttttttttttcgtctagattttcccgtgcaagaaattgaattttgatatgaaaagttaatttaaatataattacttaatatatttactataaaagaatactttgactctatatctaagaactttatataaaaattatattgacaagctctaagcatatcccccatttcaggttcttaaccatattgatcttggaaaatggaactactaaattaattaattaaacttgattaatctactttgttcatgcatatatcttgattcaggttcatagtatttttcttattcatgtatcttgcatttaataccatctagtttttaggagttgtgttgtttgaatgtatgtatgctgtaccaagaggtgccttgtacaatttagaaatactcacgtactagtgaatttgcatataagccaagaaaagaaaagaaaatccaggaaatcggatgaagtgagtttgtaagaaaagtttgtgtgttctccctttcccttctctacttatgttcttgttgtttccttcaattgaaattgagctttgacatagtagcagtcaagaaatacaaatcattaacagaaattataatattgtgtatatttcactgcaaatgaatcttttttttttttcctggccttttgtcattaacagatatattataagtataccatatacagttatttaattctgaatttttgtacattttttttcctagtaaattatgctcatggagttattttaattggtttgaaagttatgcacgatgttgttctttatgcttagtttagaaaagaactgttataactgtcaagctttttgatcctttgccaatatattttggtgaatactggctattgttcctagtggggtctccctaatacattctacacctcagttattgctggagcactattttcttgaatttatttgactatgttttgctctcctggctgcataagctttctttcaagaattttttatttttttaatcttgaagtagaacctctattttcttgaatttttttatcctctatcaaggctttttaactggaaaagactagtaactttaaatattgggcatatatagattttgggatttattcgagacatggagtaaccatattacacaacaatcaacaagatcaaatatgcacagttttggtggttattggtacaacatcttcaataatgcagaaatcagatttacttggctaggcatgaaatgctgatataaaaatacgaacctgtttaaatataggttaaaagtgtttttgagaatttctctattgaaaatataatatttttttaataaaaaaaactctcaaaaatatttctaatcttgaattcaaacaaactctaagaataacaattatttatcactttccaataataagaagagtatataatttttgcatgccataaaactcataatgtgtttggcaacatttttcacttagttcagagtttattttactagataaaaagtttctttaggcaaaaagcatgtatttggtaaaataacttattttaatagtttctgatgaattttttcctcaaatgctacctaaagtcacttttatattatgttttttaattattaaatataattcattttaaaaactaaaaataaactaaacacaaataattacaactaaaagttaaaatctcaagtaaattaaaatatgagaaatagaagtgcaatcaaacttttatataaaccagccttgtaggaaccagacaagtgtgtctcgactgccatgtttggtctaaaagaaatattaattttttaggtcctttactttacaatgtcaacaatacagttatctttagaatacacaagtttaattataaaaaatattttcgaagagctcagatatcaatcatacgcgaaagataccccttttttgtaaacagtttaattatgtgccatatgatacaaaaacaacttaaacaaagaataaagactcgcacgggacaagatatatatgatataaaatagatattgccagacataataaatagtgaaatatttgactacatttaatatagaaaaaagagttatacattgaaaatttagtaaaaaaattgaataatcattcaatgacaaatttattaatttttaaaataattatcttaaaataatttaacaataatttataattaaatattaataaaactattttaaaatacataaacattaaactctttaatatacctatacatatttaatagtacaacaaattacactaacatctaatttttttaagagtctaatgataatgaacttgtagtataaaataatatatagtcattttaacacaaattatttaataatttatgattatatcatagtgtaattaaatattttttattttagaaaataacagtgtcaatataatgtatttcaaataattaacataaactattgtaataatggttaaaaaatataaatgttttatgcggtttcaagaaattataagatgtcgctgtaattttctctttggtgttaatatctatttagagacgataacattcgcaatccataattctctagcactacaatattttcctttttactgttttggaaataaatctcgtgatctttcaccttttttccctatactataggtatcttctacaaaattaataggaaatcattcttattaaacaagttttttttttcacatgtaaaactcaaatttcgggaccttaaaaattaagcatatactacttaaatcaaccactcgttagtatgtataaattttcattttatctacattgataatagatattaattacaaaaacattcattctctcgtgtatgttaaaatcaccgctaatcaaataataaaatgttataaatatagattatagagtagtttatatactctttaatatgtatatattggaggtggctaagcccaaggagcatgaatgtgttgaagctatgataatggtgatgtcatgggttacatgggaataggaatgacgagggatgggaattgggtggtaatgtatattttgaaacaatttgactcaatgaaaccaaaggtggacttttccttttacaaaactggcaggttctaagactttcaacatataattaaataattcgcctttataaaatcaaatcatttcttagagtgaaataaatttattatattgtttttattcttaatgcatgtaattttattattgaaattattttatgctttccaaaaaaaaaagttaatcagtttaatttatgtatttccccccttttttatacgtcaaaagaatatatttttaactttatttaatattaacttgttaagatattatttttatttcttactctctaatacctatattctcaaattaattacttttgtgtgtactatattcttctaagaataatttactaatttagtctctttgtaaaattccctacaaaaaattgacacgtaattttgtgtttctaaatttaatttttgaaatttattcatacttacttttttttataatctttcatattttattacgtgtttcaaagattaatctacatgaattgcatttatacgtttttcataatgttaaatatttctcttaaataacttttagtttatattttgaaaattgaattaaatttagacatgttcttataatacacaaaatattttatagttataattgttgtcaaggaaaatactaatataacagttaatacgtatatcatacattacgtacattggagtttttaaacttccgtaattttttttttgaaatgatcaaaacgaagattaattaaaaaaacttaaaactatagttgtaatatgcatacctaatttataattattcatagaagaatactttaagaatttaattatatatatatatatatattattaaaacgaaataatagttactagataaatctattattatattatatattataatacataacttaattagaggtaggacttttactcactctcactttcttaattaattttttttaccaattaattaatttttttaatattaactttctttgtcttttagacgtgcatttacagcattgctcaaataataataaaaatttcttccaactatctcaaattactttttttagcctttcgtatgtatttcatctttttaggtgtaatttttttttcttatcttggtgtctaaattaaatttaaataattaattcaattatcaacatttaaaaaactgtgataatttaagttatttattatatgtttaagaatatttatttgttaaacttagaaaatataaattttgttaatatatggtgcatagaaagatattattagttattagtagggacaaacaaaaactgtatctttgacaatccatcaatgataaacgtttctttcaccttatataatgatggtgcatgcattttttctctttaaaaaaattgatattgtaattggaatctggtctcttggatctccataaccttcaacgtttcttcccttagattaggggcacatatcacatatcattccttccaaatcttctcctgaaaacaaaaccatgatgagaaggcattcccttgtgactgcatcaccaaaacaagggtccctcttctttgttggcgacgacgacaacaacatcaacccaagaattcatcctcacactcacacccttctgactccatcatcaaaacaagtcacagaaaaccataatcactccaaaaccttcaaaaccagtttcaatcacaacagggtaaacaccttgcacactggttccaccgtacaacatgttgaagcggatgaggccgttgaactggatgtgttgtggacgaagatgcaggaagaagccaaactcgatgtcactgtggaacccattttgtcttattactacaacacttccattctctctcaaaactcactgcaaaccgcgttggccaatcaccttgccatcaaactcagcaactcaagcctcccaagcagcacactttatgatctttttgtgacggttttggagaccgataaatccatcatggatgctgtgaagagtgatctgagagcggtgaaggagagagaccctgcttgcataagccacgtgcactgcttcttgaacttcaaaggctttctggcgtgccaggctcacagggtggctcacaagctatggtttcagggaaggaagattcttgctatgatgattcagaaccgggtttcccaggttttcgcagtggatgttcatccgggggctaggattagaagtgggattttgttggatcatgcgactgggattgtggtgggagagactgctgtgatagggaacaatgtttcaattctgcatagtgtcactttgggagggactggtaaggtttctggggacaggcacccaaagattggtgataggtgctgattggtgctggaacttgtatcttggggaatattaaggttggtgatggggctaagattggtgctggttctgcggttattaaggatgttcctccaaggactactgttgtcgggaacccggctaagctggtaggagggaagaacaaccctgttaagttggataagattcatagcttcaccatggaccatacttcccatattgctgacttttatgattattgtgtttagactttagagtgtagcgtaatgtaataatcctcaagcatgtatgatttggagttttgtgtttaggattttaggtgaagtgattttgatttttgattggggctgttcttttttactatttgagtgtgtacaatagcagcaatgagatttgaacctaggacttcatgtagactactcaaatctcttaaccactaggccaactctggtggctactggtgctgttcttgtttgagtaatagagaattcatgttctcctgctaacaataataaaagcgaaaataatagtaacagcctaacaggaccccttgattacatgatgttattgttgggtatgtacagaagctgtatttgtgtatgtatgcatgattgtgttgttgtaagttgctgtatatgaatttcggttttcattgctttcattatctattcttcttcttgttatgttgcttttccttgttggagattaatgtgtgagtggtagtctcactgggctgtagtttaataaaattaatgtagattgtaggccatgaagatatatattggatggtatgcaccttaataagggtagtgctgataggcttttcagtcgtgcatccagtgctgttctcagtttgagcactcgatcgtttggaatttataattttatgattgttcaaatttccattttttttaatataaaagtccaagactgggtgttataagaataagaaaagccagttctttcaatcatcaacatcaaaccatctttgcaagagcttaggcaacatcaaattcttatccctgctaagttgtttttatttctagttatcgtggtctgaggtattttttcagaggtagaacaaaggaattactctttcagacctgtacttttatgtgttggtttatcatagtttttgtaatctaacatgtcctcttaagcaagagcagaagctcttcaaattaaaagcatagactaataaacaatgcacaagcttatttcatgttgttctaattttaaagatgaagttcttgtggggaagttattaaattgctaagcatctaaaatttgaaggaagatatatgaacaacactgaaacggatataaaattaacacaaatttttcaatttttttgaagtaacacaattttgacttagtcccttcctggggcaattttggctttcactatgtttggtaaaaggatttgatggtgtatgcaagtgcatggtatttggacaagtaacagatggacatggttggggtacagactcgccgcattggaagtccaaagtttctaactgctagtctttaggggaatgtactgcataaaaagcttgtcatcctatgaaagccaatttcatgacggaacatgataaacaagcaacaaaatggctaatagaaattctgaatgttgcaggccaaatacaaatggttaagataatatgaatattcttgtattaacttaatcacagctacgaacactggtatgaacaattggtacacaatgctacaagatccttcatgtttatgttattaaccaaatgtgcactgttttcagaaaatatgattttatacctactatggtatttcttcaaaaagtatatttatttaggaaaaaataaaaggaaaatggatggttttataggttgtttgattgtatacttaagtggaaggaaagaaaacaaatgtatataaaatgacgcgaataatataaataaataaataaataaaaatgtataagaaatgaggatttttttttaaaatatttttttttctttaacccatatatatttcatgggtagaataggtctacttaggctaacaagcttataattctttttttacaagtcttatcataaaatatacttttaaacatgaagattagactagatcttaaaaaatgcggctaataaataaatatgttagattcagactttgtttatgtaataaaagtcacttttagacctatcaaaacatatttggtgtaatctattttcatctctattacaaactttttataaaacaaatacatcttatatcacttataaaagtttttttttttgctaacatattacttataaaagttttaaaaaatattagataatgttaaatatctattaaatataagggatataaatataatatttttcttttgtttttgattttatgagttttcattttaatagattgatatagagatttgcaatagttttaaacagtcttaattgtgatgcaatttaatttagttttacataaaaaatcatttgaactaaacatacaactcattcaatttgatttgaatgtaatatccaatttgaaccaagtaaaactattttttaaaacttgtttatgtttttttttccttattttcttaaatttattttatgtttgactttaaaatatttctaattagacaaatagcaacacaatttgatacggcgtaaaatatataattttattattaagtaatgatcaactattaaaaataacgtttaatttttatcaattatttgtaaaaaaatatatttactaatatgaatctaatgaagaaaaaaaaatcagagacctagttaaaaatttagtaaaaaaagatgagacctgcgggtcaatttaactattttttatgtgatcagttttctatttatttatttatgaatttagcactttaaaataattatttgttgagacttgagatattttcttgcaaaatatacaaggagtgatttgcaatttgtataaacttgtcatgtgacccattgtgcaagtaattgagggggattcataatcatttgtatcgaagaaagaagcgacccaaattcgaagaactttgcttccttcaaacttcaaagtgagatacggggctcaagatcaagaacttcaacctcaacctcccttctctgtcactgtgactttcgtttcgtatcgttttattattatttttaattatcctactttctctttctctcttctcattatgtattcaaaaccctagctaggtttttggagctccctttctttccgatcccaccgtcaaacttctctttctatatgttttgcagggtccattgaatatgtctccgtcgttggatcttcctcccaagggtggcttcagttttgatctatgccgaagaaacgcaatgcttcaaaacaagggcctcaaagccccaacctttctcaaaactggcaccactattgtcggtttagttttccaggtctgaaatcattccctcgctcttttcatgtctagttaacctaattttttcttattattatatatttaaacatcgctgggtttttatttgtttttctacgtgtttatcttcactcttttttatctgcttctttattttgatttttttataccgtaattgtgagtgggttccaatggaataatggatccagacacatgatgtgaagttatggttctgcttggaatctcgaatgaattagataatttgttttggtagatagatgtctggccttgtgaggtttcgctgtgcgggtgaaggaaattcaccttatgtaaatgctataagttttgggtgttatatttgcgtaggttgcgaatgttgaatttttatttatttatttttatgttagggaaatagttggttctgaaattgtgcattgttttatagcaagagaatatgggaagcctagtctggctctggatatcttgacttgtatgttttgaaaatctacgtgactgtttttgaactcaatttctatctgtaaagtagtaatattagtctattactactctctcttttctctgagaaatttgattgattttttattctaaaaatattttaagtaaaatgttaatttttgttctaaagtatatgaatgattttactttagaaacaattggcaagaaataaagtcataaagctcctgcattgatttataaattttgtaatatataagtggctacttcagtaactgctaatcatattgacctcaacggtggatattgagcatggttaagcttttttcttgtctacattgttccatctagctggggaacaatcaacgtggttgtgattctaatgttacagctgaggtttaatatgaagattttgtatcataaatttgaaaccaagttgctccgtctacagagtacagactgatttcttgtgaaacagtccactaactgggaattgtaacatttgtatttgtgctgttaatgagacttttcatggcaatattatctattccaaacaaagttttatgacttcatatgttgattgcatatttatttttaatgtttaatttgtatattgtaatctaaagctgaactttcccacttaataaatctgcctcaggatggtgtcattcttggtgctgatactagggcaactgaaggacctatagtggctgataaaaactgtgagaaaattcattatatggcacccaacatatattgctgtggagcaggcacagctgctgatacagaggctgtaacaggtatttgtttaaaatgcatttttcttgttagttgttacacatttttacgttatgccttatggatagttgcatatggaccacaactttagcttttgctcttgttattattgatgtagtaaaattgttgaaaatgagaagtttgttatttactgtagacatggttagctcacagctgcaattacatcgctaccatactggtcgagaatcaagagttgttacagcactgacccttcttaagaaacaccttttcaagttgagtttcagaattttctcatcaatttaattttctctctgtatcaaccactgaatctgactcttttaaactattgtgcagttatcaagggcatgtctcagctgctttggtgcttggtggggttgatatcactggacctcatttgcatactgttagttcattgcttaaaacttttcttttatgctcaagtttccttgttttggatgcctatagctcaatttctcatgacttgttttgcagatttatcctcatgggtcaactgacaccctcccatttgctacaatgggatcaggttcacttgctgcaatgtctgtatttgagtccaagtacaaggaaagtttgagtgtaagtaagaatttaaggctcacagcctcatacgttagtaaagctctacgttagagtatttttgaggaaattcacccttagaggagtgcatttgatacattgttgtgaaatggaggtgccatggcgcgatgggttttgctaactgcctactatttgtgaagggaggcctgccatggctgtgccatagaccacaatggcatgcttatatggcagaattcttgccttccaccattgataacactgatttgataatattctgtcaaagctgttcaatttataataatttcaatggaacaatatgaagcaaatatgtcaatttcaaatctaaatgtaaaaattgtgcattatatttgttataattgatactggtggtgtttgtaactttttatcatgttgaaatgctgcattttgatagagattttaatttgatataaacattatgatgtggtgtagagggatgaaggcattaagatagttgttgaggcgatatgcgctggaatatttaatgacctaggaagtggaagtaatgttgatgtttgtgtgataaccaaggtgagtgctttgatgatcaattgtacaggttgttctttgatgagagtcatctaactctaatttctgcacaatttcttcattaatgcttcacagggacacaaggaatatctcaggaaccaccttctaccaaatcctcgtacctatgtcaatccaaaaggctttgatttccccaaaaagacaggttagttgcgatttttgctaatttaatatacttgagactgcaataaaactatattgttttgcttagtattgtgtgtcaaccgtcaatagtttgtagtctagcatgacattgtatctcaccttgtgacaaatatgataatcttgggaatttggtgttgtgaagtatcaaacttagataatagctcaagttagacaagcccctttcaacttgttgctatatgattaaataattgacgtttgacagagttgtcaatttgacgttcatgtttttctgattaaagaatatgttagatgagtacttattaactaagggttgagatgagtgctctattaaatgagggttgtgtgttactgtgtggatgagttttgggtcttaaagacccaatccatgaaacacaaatatgattatctctttccttttgaagttcctataacaaatctactccacttattattgttgttgtttaacacaatgttacacaaatacacaaggctacatatagtagaggctgtatgcacattaccatgcatgatgcatgtcatatacacaattccgttaactatttaaattaatagttattaaggggattacttatgctgtcttacaatttaggggtttgattgcttcaattggaagcacaaggaggcaaattgcacataatcctaagttgaggagtctttgtataatttttcctagataatatacatccatgacatttttatataaagcagaattcctattgagggcttgagaaaataattaaacctttaatggcctgccctttctgtgtctgcccatatctcctgtttcctttttttttttttttaattctagctgattaaacagtatggagaaaattcctttatagaaattattttacatactgtactaatatacattctccattgcagaggtcctcttaacaaagattaccccgttgaaggagaaggtggaagtaattgagggagatgttatggaagagtaacaatcgttccaaaaaatatttggtgtttgagtatgaaacttgattagtgcaatggctgtgatatttagttattgtagtttcacaactttggctttcattaccaaaaaatatttgaagttaattagattgttgcaagttattcctcaaatttcttcatctggttggattttgactagaaaatgcttaacaaaacatcaaatatatacaatttgattgatgaaagatgttacttgttttgttttgacttttcaagctttatataaatataaattggtctataatgagattaactttgttagtaaattgacaatttcgacaggcgtacttgctagcaagttgacaactttaggaatcaatctgtgtaagggaggggttttatgtacagttgaaatactatgccacaatctgtgttgacagttagttttgagtcttttgacaatagagtggttttatatttgtgaaaaaaattattgtttgagcgagattaaatttgtgaaaaaaatggagattaaattcatcaaattaacatagtggaaagaacaaaagtataataaagttattgtttgagcgagatttagagtgtaaaaaccattatctttgttttttttttttttttataaaaaagagtgtaaataccatcagaactttttttaatgcaatactattagaacttctgttattgttttagtagatcatttctttcaattaataacattttaatgttaatttataaatattttgaaaactaacattatttacaaaaatagagtattgtataaataatggtatttcaattgaatgtttaattaaagtaaaacttaattttaaaaatttggtcattcaacatttatttatttatgatgaattctaaaataatttgccatttgatatatgcatgagtattatataagaaattttaaatattgctaacaaataaattaaatctttggttaattgtaacttttctaatttaactcaactaaagttttgaaccctaactttattattttttctattaaatacatttatatgatgatgttatgttttgtaattaacattatcaatttatctatcaatgtttcagtacattatatttgacattatcgaatcttactacatatgatttttacaaatgaatatttacattacacacttttaaaatgtataaccaacctaattaaaaactctaattttattttttgtgttccttaactacatctatttgatgttcatatgttttgtaattaacattataaacttatgttacaaggtttgcatgttatatttcatatttatgaattttattatattttcttttttcacctccaattttacataacatgataatgtgcatttaaatgtataactaatctatgtatatgcgcacgggtcaaatactagtttaaactcaaataaaaaaatgaattttttaatatttactacatttttataacttattttgtgcattataattataataaaagtatttttataattataattaaattttttatatcattatcatgagctccctatatagagccccaacaacaagacacgtgccaacatcattaggctgacaaaaccaacatccaataaggctcgacactcttgagaagcataagctgatgaagtaatcattttgtccaccaccagtttgctatcaaattcaaagaatagatctatgagacccatctaaatagcaagagcttcaacttcttcaacgtcacttctattggaatcacagatggacaccacttctgatcaaattatatgggtttttttccattaatttatttatcaaggactatcaatcattgattgaatcgatgaagctcctatttgttttagtatttacaaattattttttcatacttttttaattaaaaacatgttttatgataagtttatagttaagatcaatttaaataggtacatgcatcttaattatacttaacagttcaaaattaatttaattaaaatcattttctttctaacttttttataaaaaaactaacccagaatttaatgtttacaaaaaattattcaaccaagcaattaagttcaataatactaattcaagaagtaagtaaataaatctttttctaatgattatattttaaactattatattacaaattatcatttatcttaaatatatatacacagtatcataagaattaagattataatctctgttcatttcgaagaactaatctaatgactatatagataaacctcagcatcgaaaattaaacgtatggccaagagtcgtgcttgcagccatttttgaaatattaattgtcgacgacttttctaaccattatctttgttaatttctaattaaaaatcagtccattttctcataagctaagaaagcagcagcagccgcaccagtaccagctatatttcctcgtttcagcaccaagctgtgaatttgtggtttaaacctcaacattacttcacagccaaaccatactttttcaaggttataatcttgatttataagaatggggttggagcttcatatttccttatctataatccttcctttcttcctcttagtgttcatgctaatcaacacactttggagatcaaagaccaagaattcaaactccaagttgccaccaggaccaaggaagctacccctcataggaagcatacatcatcttggaactctacctcataggtccttagcaagattggcaagtcaatatggttctctcatgcatatgcagcttggtgagctttgctgcatagtggtatcttcgcccgaaatggcaaaagaagtgatgaacacacatgatatcatctttgcgaataggccttatgtgcttactgctgatgttatcacttatggctctaagggcatgaccttcagcccacaaggaacttatttgaagcagatgagaaagatttgcaccatggaactactagcacaaaagcgtgtccagtccttcagatcaatcagggaacaagagttgtcaatttttgtcaaagagatatctttgagtgaagggtcaccaattaatatcagtgagaagattagttcattggcatatgggttactatcacggattgcttttggtaaaaagtccaaagaccaacaggcttatatagagcatatgaaggatgtcattgagacagttacagggttttctcttgctgatttgtatccttccattggacttctacaagttcttactgggattaggactagaattgagaagatccatcgaggaatggataggatacttgagaacattgttagggatcacagagaaaaaactttggacacaaaggctgttggtgaagaaaaaggggaagatctagtggatgttcttttaaggcttcagaagaatggtgaactccaacaccccctgtctgacactgttgtcaaagcaaccattttggtcagtatgtttcttaaaaatctatgcaaaaggcaaagataattatatccaatcaaatagttctaggtatgatttttttcttctctcaattgatgatttgatgcagtcaaaataggattgattatattgatcttgaacatcttttacaagagaaatgttaatgacaaattctctaatacaatattttgaacacactttttatttactgaaatttattaaaattacatatttgtaggtcatacttcttatttattagccttatttatgattttacaatttttaataaattttaactagtaatagaaagtatgtcaaaaaggctgcatgttgctaaacaggccagagaggatccgaacttgataggagtgcgttagaaagagtgtatcaaagcaatcttattgtttaatattttacatataaaaaaccgtccaaaatttccaaatctgagtcatttagtagactacctcatcagtcatcaagagctgtcctgggtgcacttcatattttaatttatatggagttatgtaatgaatattgatctaatgttttgaactgagccggttttaagttattcacacttaaactatgacttacattaaattaaactgataaatttctttctatgataaattctggttattattgattaatctcattagaaacgtaatactaacaccttaacatttctgtcaggacattttcagtgctggaagcgactcttcatcaacaataattgtttgggtaatgtcagaactagtgaagaacccgagggtgatggagaaagtgcaaattgaggtaagaagggtctttgatggaaaaggatatgtggatgaaacaagtattcatgaactgaaatacttgagatcagttatcaaagaaactttgcgtttacatccaccttctccattgctgcttccaagggaatgcagtgagagatgtgagattaatgggtatgagataccaaccaaaagcaaaatcattgttaatgcatgggcaattgggagggatcctaactattgggttgatgctgagaaatttattcctgaaaggttccttgatagcccatttgattacaaaggtggtgattttgagtttatcccatttggagctggaagaaggatatgccctggcatcaatcttggcatggttaatgttgaattctcacttgcaaatttgcttttccattttgactggaaaatggctcaagggaataggcctgaggaacttgatatgactgaatcctttggcttgacagtaaaaagaaaacaggatttgcagttgattcctatcacttaccacacagctacaagttaaggccataactattgtgttattaaaatgaggttgctctcaaacattataatagcatggatttctttttttttttttttttttcttgtgtgtgaatggagcatggatttcatttgattgttgactacatcaatttgttagccaaactaactagtctcaatctatatcaccatatagattacaatttgtttgtcaaactaagtcaatagtcaagaactctatgctagtcaaatatttgaaatttgtgttgtgtacttattattagggtgttgtgtacttatcattaagcattacccataataacacctatttgaaattttttatatctaaattgttgcagattttaatatgaaatatttttttatatgattttctaggtagattttatttttatatctgataaagtatctttaaatgcatgattataaaactaattcttttaaggatgatggtcaaataaagttattttcaaaacaacaattcttgaattcttaatattgaaaggaaagtttatataaagtcataattcattatggtggttattaaaaaaatcattttcattaaaattatagataccattaagaaaataatttgaagaaataattaatataaaattttgaaatttctatattttgagaatatttttaaattcaaagacatgtatttttcttcatttcaaagaatcactcttaggtaaataatataataatattaatgatattatattttattcaaaatatgtatttaaagattgactttgatttgaagcacatgtattttttaccattggaaaaagtttgtatctccattatgaaataaaataatttatagataaaaaataaaatttgttatatataatttatttgactaattgaattagtaatattttaaaatgatcctattctaactaatataatattctggtaatattcaatttttatgatattatagaataaacatattatttatttttgtatttgtatatagtatttcttttaaaaactatccaaatttcaattttggtactttgcgacaagacaaaacaaaaagtatatgaagtcaaaagaaatactctatttaatagatagattgtgaaaaactctgtgtatatattttcatataaatatgcaccatgttacaaagttaccaaatattttagtcaataattaatatttgtacttgattttatttaattttgactaaaaattttaaattttctatgtactatatatttcctatagatcttatagttttaaataaattaaaaaaataatcttaaaaattacttaatagagattggttgacttaaatttaaaatcttattatctaaatttggaattaagataattttatactatatcattcgtatctttagaacatataatttgaccattgtgtaaaataatttactttaaaaattagtttagtttgatatcatgctaacttttgctatattttaaacataaaagacaaaaaaatccccagcagatgagacataagtattcgttgttggttttttaaattagcaaacaaatatcattaacttggtaccagtggtacccaaataaaaaacatattacaaaaagagaatatccaacttgaagcaatgaggttaagctgtattaatatcaactaacataggaatatttattaacctcaagctaacagcctgaacatctcaaggaatctgcatatttctatatcagaaaattatacccaccccagataacatatcccttctcctgttacaaaaaactctgcaccttagccttacccattgcaacccaaaacacaacaccacaatgttgatctcgagtgtataaccctcggcccaactcaccaaagcattccgattaggcacaaagaaggcaagtgggagtgttgctactccactggacaaaacaacaagtaaagcctggtgtcaatgatctcaaccatgaccaaacacagaagttaacatcctgtaccatatcagaactttgagcagaatctatattaaaaacaaggttattccttttcttccagacacaaaaaattactgcactccatataaccatccatatattgcattcagctgaagaccttccaatgcccgagtggagccaaaaatgatcttgaagtgatttcggtaaagctagagcaaaacctggcgaaatccaactgtgacattctaaccagattttaaacacagcttcacagtttaagagtatatgctgcatggtttccacttgttgattacagagtggacacatcaactcagcttcatctgtgataattcccctcttccacgagttatctttagttgggaagcctatctctcaatgctctccagattaaaaatgcaactttccttggtatatttatccgccatacctctgctaaggtgatatgcagggcctctgagccaccatctagtgttcattgtgaatatgcagaatttgtagattaagtgcccaaagggcttgctctccaaatccaagaatcaacaatgttgttatgcgcctgcacagtttccaaaagagttgttagttgtaaaaacatctccctctcccactcaaaaggctctcttcaccaaaaactcccaagaccatatgccattcctccaaactcccatattcccgatcagctccaacttttgttccgagattaagaataaccttggaaactagtttgccaacaatttccatccacccaagtatcaacccaaaatctcactatatccccgattcctattttccactggatcccattatcaaaccatttttcttgattaagccccctacacaccctctttaagtccctccaccacaagctttccaacgaagagctatcctcactcaagagaccacaccacccatcatattttgacttaagtacatcaccccatatccctttttgattgtgaaagagattctacctccacttctccaaaagaatctcattgaacaactcaatctttttgacaccaagacctcccttcttctttgacaaatatcattccatttcacccaagctaatttattaatatcattactccctccccacaaaaaccgtctttgtattccaacaagtttagcgcacactaccgtaggaattttgaaaaaggagaggaaaaatagttatatggatgataggatggaatttatcaaacaaaccctctcccaagagaaatatgtttatgcttccacaacgttaaactcttcttaaatttgtgattaaccagttgccacgactcctatattggaaaagaagatatttgagaaaatgaaaattttaaaaagatttggaggaagaaaatattttattattatacaactcgttttatctattggcttgatagaaaatagtggaaaactttcatagttatactaataatacctccttaattaataagtaggattctgctaacacaattctcatctaatgactataaatcattatctagaattctccacactattttagcttaaatatttatgattgtgatttctagatacaattattctttagatatttttatgaaaatatctagagtaaattattctaaattttagactaaacatctcttgaatatttttagatattaaacaatttaacaactaagttcaatatacctaaaccaaatttattattattcaacatcctctaacctaagattagtcccgatcagtaatccttgataaacaatcagtaaagaaaggattctataatttaacatacttacacaccactccttcacctcatccgccaaaccaatggatatttggagacataagtgttagtactaatggatatttgaagtttcaagaacatctatcatcactcaatatgtgataaatcctagtagtatatagggctaaaatctcgtgtattttttttttctattcacatgaatttcacttaaaaaggtataaactcctttgaaaatgaaagacaaaaacggaacttaccgaaatgcagaaaagaagagtataaaaatattagtcaaattaaaagcaatgtgaattaatgcatgatcatatatttatttatttgtttttgaccaaatgcatgagtatattagtcattccaattgggtgtgaacacacactgtgtttactcactaggaatgcgtccttttagcttaccgaaactgaaaaggtgtattggtcttatttgacatacagacacaaaactttactcattcaaatcctttttattttcataggcttcaaaactggctttggtttttgttcagtaaggccttccctattcctgtgctactcacttcatcttcttactctccctaccttgaaaaaacgtgttttttttttttttatcattgtgacatagaaagcgtagcgtagtacgttcaaatctcacttcttcttacgttccttcattctctgatactgataagaaagtctcattctgccactgattttttctttctatctttttcacaggaactttacttgtagcaagcaattgtaacgcaagcttcttccttgcccattcccccccaaagtttgcgacttttgagattctcatggccttccaactcaaactcgaacctaggtctccgcctatgtccacttccaccacccagaaaaactacaaagagatgagcatttctcagcttgtctcggttttgcgtgtttcgtttcaaacggaggattttgacaaagttgaggaagaattggcgaacagggacgccaaatttaaggcggagattgagccactccgggagaagatcgaggtggagaggctcaagaggattgaagccgaagaaaaacttaaaaatagagatgagcaatgcgaaaaggggaaaagagcacagcaaaactatgagcagttgttgaaggaagtgaagaaaaatggtttggttgaaaaaaacatgattgacgagttaagaaaaatgagcctcgctttacaacgtgaaaattgtgagctgaagggcttaaaggaaaaatggctagatgaacttaggagcaagatcagtgtgttggaggaggagaaggatggggacaagagtgttcttgatgcccttagcacaaagaacagtgaattggaggaatcgataaagaagaatttgacagacatagagaggttaaggaaaaagaatctttctctagaatgtgaagtctgtgagctgaaggaattaaagaaaaaatggctagatgatgtggctgaacttaggagcaagattcatgttttggagggggagaaggttggggagaagagtgctcttgatgcccttagcacaaagaacagtgaattgaaggaagcaatcaagattaaattgaccgccatagaggggttgaggaccgaaaatggtaaattggcagatgagaagtgcagacttgagacattgatggagaatttagagagtaaatttgcggaaatcggtgtcaggattgtgaagttggaagatgctacacagtctttgttagattgcttaaaagctgaaggaattactgtcaaagttgaagaggttggtgactacgagcttgaaaatgacactgggggccatgttcctttccaaaggaatgaagatactcgtcactcaattgatgctcagtctcgtagcaaagggaataaggatgctctaggtgcatcaggtatggaattctgcttgcatcaggtatggttcaaggcccagctaccaagaaatatgaacaaaaaaaatgcatcaagaattagatttgcatttttataatgcattttgttcatatttcttggtagctgagccttgaaccatgatgattatttattggtaatggctgtggtcaagagccatgttttagtaacttaattgagccggtggggccattaattattgctcaaattggatgaattggtgactgaaccagatcacattaaaatacttaaaagctcatcacagtttgcaattataattagacacaatttaagaacatacactcctcacagcatccaatcttgtttttgaagtgaaaatgtcacagttccccataagtttcaagtttgattgaccatgtttacacaatgaatttattaatttggagaatagcctaaggtgtctacttgcaaatgcaaggtaaggctgcccacaattgatccacactgtaggtcagacacttccttggacccccacacagggagctttatagcaccaaattacccgttttcagcctaaagtgtctacttgtgaaaagaagcctaaggtcaattttcctttgttatctcaagtaaaacacagtattgttcctgttgtcttcctttgatgttagacacatggtttgatttggagagtcctattatatttttgttcccttagaaaactgcaagccatctcttgtgatttttttcttttttcccctgataaaattttctttcgatgagaacaaaagaaagaacaaataaaagcaggcaagataacttgtttctcccatacaaacaagattacatgatacccttctatacatattatatgaatttgataaaagtatacattgttaatcacttgaagagcttgaggctggattttcatcaaatgctgaggcaacaaccagtttctatttgtattacagaatctactaatctttattctcctagcttttgcttgaattatcatgttaacaaaaataaattttatgtaagttttaacatatctcttttgtgcctgcagggttcaaattggaatgggaaaataagatcataaacctagatgatgatgatgatgatgatgatgatgatggtgatgggtgtacatcaaaaggattgcatggaaagaaagccatttctcaaattattgcagaaaatgaacatccaagttcatcgtatgcaatccagcacaaaagcatttttacagaagcacaaaggattgaagaaatcaaaacaaaatatttatctgatatgcagaattctacttccacatcttctgatgatgatgattcatttgagtttgacgaaggtaatcctcccaagagaagaaaaactgcgccagacagttctggagtaaactctttgccaaggtaaatggagcaatgagctatgttaaatatccttagccatatacccttttgtgtggttatattgaaaacaactaactcagtcttttgtttgtccagttacttcctcactcgcaaaatctagagcaggaggttcccagccaatcttatatgcagaagtttagattagtgcttagttttaaaagtattcacatgttggaatcgtatattgcagatatggtagtcacagtatgtttgtatttattaaatgtactttatttaactgataaattctatgttacctaatatatgtgtttatgtatggatgcataacgagatatgtagagaaactgtgcattccaatatctagtaacgtccatatctttgcttaccttagattcctctcagtgattaaaggtctattgaattttgaaaatcgataaattaagtaccaagataacctaacgttttgaagcaggagattgataccaattttaagtagccaacgttaacttgagcggaattgattgaatacttttgtatagttgaagttgaatgtaagaagataataaggacaaaaggagaaaaagtaataaagtattttaaattaaagaaatacgaacatgggtgatgggggaggggtgacttaccaaaaaatgagttatgagcattttgaaggaaaccaagttctctttttcttggaacatttacttaatcatagctgcttaactttatgctcctactaaaatagtaataggattgaaagaatgggatctaaaattgaatctattttgtttctttgatgccaaatgcttcatttatttatgtttcctcaatcggagtagttccattgggaacttaccagctataatagtaaaacaactgtatttaggggaagttcaatattagatttaccaaataacatgagatactaataaatttgtgacaaatagtaatctgtgtctttatagtatgggttaagaaattaaaaaaaaaaaaattatgggatacataaaattatactgtttatgactgacttttttacattttcatatgattttcacaataaatatttgttcattttagttctattattaatgctctaaaagtattacttagtaagattctaaatttattaaagaataattagaaacgtgaataaccaatgaaatagttaataactggtggacacatcaatcaggtcctctgatattggtagtactttggtttgttgatcttgattggtagtactttggtaattcgtagtttttaaataatatttgttctcccgtgagcatttatgaattatgagaacaagaagaaataaaggcgggaatagtttcatgcaatattccgtgtaaatttaacaagaaaaaaatttaaaattataaaaaaaatacatactgtatataattaatttaaataattaactaaaaatattaaccactaagcaagtagtgtaaattcaagaagaaaattaaaaacactttttaaagaaaattaaaagaaaaaattaaagtacaagtaaatgagatttaagataaaaataataatataaaagaaaaatttaaaattaattgaaactaaaattatcgtggagtatgcatgagataaggaaaatgaataaagtcctcgggctaaaattaattctgcattcatctaccaaagttcaaagatgcaaagtatctatgactctttctattactaggtttctgccatgtatcatgcatgcagtttcttgcaatctatttcaaacatcacatgagagaacaatgcctgcgcagctgttataatggcccatctcaaacaaattaagtacctcagcaacatctggttgcggatgctaaaacatcaccggtcggcctctccaatctcgaaagataaattataccaaatcctgtaccttaatttggtctttttcactggggcatcaatgttgcatttaactacatcttggggtggaaacttctaaagattattggtcaaaatcatgcatgcgccactttaaagactgaaacagtatatatctgcttttgcaataattaacgtgctccactgtccaaaatctactctcaatcaaatagccaatgatttcttcatgttagagttggtgacccgaatttttggtgaaaaatattttgagaaattttcgggggtctgtagtggcagcagccatccctgctgtatggacctttattgtgataaggttttacattagcagttacaaaatatatatgctgctgtaacctaaccgcttgtatgcgttctcttgtaccttttttttttcaacatagtaaattgtttctcatttgctcgtgatttttttttctgaaaggattttctacttaaaatctgtatgttaattcttctttcctttatctctgttgcgcatatatttctacacttcacaatcagatccattcaaccatgtagatagccaatcagagaactgctgaacatcatccattcaacctgctccgctgttgaacaaagtgagggttgacaatgtggtgcctgattttttgtgtggatacattaatatttaatgtagacgattatagaaaattgaaattttaatattcgatcacaattgcacgtcaccttctacttctttaaccacaaaataaaaaaaacatacccaacttcgcaactattctacagctatcaatttttttttaaaaagaaaagcaatggtaatgaagcgaagaagccaatgcagttgttagttgataacaagtatgctataatatggcaaagaacccgatttctcatggtaggagtaaacatattgaaacaaaatttcattttctgagggagcaggtgaataaggggatgattgaaatcgtgtattgtccaatagaattgcaaattgttgatgtgctcactaaagcagtgaaagttgagcgatttgagaagctatgaaaggaattaagagttttacctctttgaattaaaggagggtgttagttagttagttcaaataggttagttttgttagttacatagagttggttagctagttattaactaactttgtgatgtacaatctgtataagatagagtgcttatgtgaaataaacaaaatgaatcaataaacatctacaagctttatcattctgtcttccttcttctacacaaatatttgttttctgagtgtaacccaacaaaatcaaacccaagtcccattatttagggcattgacttccaagtcaactccactagtggttctggcaacaaccttaattgggttttagatggagtagaaaaagatgttttttagacataataattgccagttaattgaggatataaaagctctaaatctcatagatcaataaaatcaaagcagtcattttacctttgtcccatctttgcctacaatgacttccaaggcaatgtaagtgatagcatcagcgtgcgtaatgaatggggtagaaatttgatactccatgaaaactaaatgatgaaattaagttcagaactaattaagtagatatatggtgccaggctgctatacaatatgtgatcttagtttcaaaacttattgatatatatctacctcttatatatgtaagttctataaaatcaaattacataaattctattactaaagtaaacattcaatgggcataaattacaaataggaattgttaacttgtttagccaaatgtcttaccatcacaacgaattattactgacggcaatgacttctcattagcagtgcagaagggttagaacctttttccatttgaatagttcttgacaaatttaatgggatgaattgacgtatatacagaaatgtccaaagtggatcacaatccaagttgctatagaatataaaactgatatatgaagacaaataggaatttttaacttctttagccctattgtcctaccatgcatcacatcgaattattaagatgatgggaagcaaatttggagatacgtattcaagcgaaatgggaaacgaagtcatgcttgtatctatatgtggaagagttttaatgacggcaacaacttctaattagcagtgcagaaggggtagaaattttattccatttgaatagtccttgacaaatttaatgagatgatttggcgtatatacagatatgtcaaaagtggttcacaatcaaagctgttatagaaaataaaactggtatatgaagacaaatatgttggaaaatggaaatgatctaccaaaatcaaagctgttaattgaactatgatacttttcagtaccgtgatttatgatatctttggactcagctcaggacttggtgagtagtatggcccaagatacattggtagtctgtagaggtaggtcattttttttttgctcaacttattgcagcactgagtgtctgagtccaacatcaattttgaaaaatctgcttatcactgacatgaaacctactgtaacattttttttgtaaagatgtccaaattctaggtagatttcattcttatcagtaaggtttagttttatcatcctgggatggggtcagggtgaatttttgtttcccaattaacatacttataagtcgcttgtttggataaacttttctataaacacttgagaaagtaaaatgaattgagttttttccataaattaaaatcaatttattcacctcaccttttggaggaacttttataaaattttgcacaagttaaaattaatatatgcaaaaagctcaattattttaagttatttttcttttctttatagaaaattttagcttaagagaacctaaacttaactagttagtatcaaccttgattatggcatagctgccaacatggacggatctgccccctcttaaattttcaagaatagataatttttttataataataaaataaaataaaaaaatagtttaaacgtttgcacaaaatgagaaattgaaaaggaaagtaaaagaataataaaaaagatgaaaaataagaggggagtgagtgtgggtatgtgtgtttgtaatttttatgaatgcagtggccacactcttgttatttttaagcaccggccacacgctaattttgtcaattttttctcttttgaattgtacatttttcacagttttattataatggtttgttcctttaattttctttaaaaaaaatttctgggacgctgtcctcgaactcccaccactggcgccccccttactttttttttttttttctggatccgccctgactgccaagtggaccaatctttttttgcctctcttggtgtctgatttgttacctccgtaacagtggcacaatttatttgttattaagcctgtttgagaccaaaaaaggtttcgtcatactttcctcccttttgaaggccgaagaagaaattataagtgggtgaagtcaccatggttacttaaaaaaaatcatgcttaaacgttagagaccaattcaatccatactctcgaaaattgaaaaggcacatagaagaaggaatttccccgccaatgatcgatccaggaaacatatttttacatgcattggaaatgatgatgtgaatattatggtttatttgttacttattggagttatcttatttaatactcaattccattaaactactgttactagtaaaacttctcgttagttatagagatcatcccactcaaggtttacaaaatgtgctctatctgaatcaagttctagttggcatgtctaagaatcaagagagagaaaaacaaagatattcaatataaaaaatcaaagaatggaaatactggggtctaccggaatgttgttattgtagggttacaaaatgaattttgtttgtttgcgacattgcgtgaggaatgggctcttgaagtcctgatgctaggaccgcaatcaaagtttaatttagctacataaaccacatctaaatttgttaatttggctataaatattcatctttcattctttatcatgtatattttccttcatagtaaatctgtgtgaacactttggagttgcacacaagttagaatggaatcatacatggggatggggtggttgtttgttgtgtgttggcatttgttgctgtttcatttttcattctcccattccttatgccatccccatgacagttttgccttgcttcacttcaaggcctcctttcccattaatacaacttattattataatgcttatgattgccctgttactaacctgaagacaacaacatgggaaaatggaatagattgctgctcttggcttggagtcacctgccaccccatctccggtcacgtgaccggcctcgacctcagctgcagtgggctttatggtgaaatccatccgaacagtaccctttttcatctttctcatctccaatcactcaacctcgctaacaatgacttctatccatctcccttgtcatctctctttggtggatttgtgagcctcacgcacctaaacttgtctaatacttactttaggggtgaaattccttcccaaatctcacacctttccaaattacaatcacttgatctctcttttccacttaattatcagtttctattaaagtggagtgaaagcacttggaagaggctgctccaaaatgcaacagttttaagggagcttgttttgaatcatacagatttgtcatcaacttcaatgaggccactcaatttgtcttcctctttgatcactctaagtcttagaggaactggattaaagggaaagttggcagatgacattctctgtttgccaaatctgcaacacttgtatctatcaggtaattttgaccttcatggccaacttccgaacttgagttgtagcacaacttctctcagtatcttacagatctcatctaatgaattccaagggccaatccctccttctttctctaaccttatacatcttactttcctggatctctcatttaacaaactcaacggttcaatcccacccttactcttagcccttccacgtctaacttttctgtatctctatggtaatcatctcactggtcaaatcccaaatgtctttcaccagtcaaacagatttgaagtattgaatttgaggaataataatatacagggtaagctgccatcaacactttcaaatcttcaacatctcatttacttggatctttcatttaacagattagagggacctctgcccaacaaaataacagggttttcaaacctaactgagttagtgttcactaacaacttactgaatgggaccattccttcttggtgtttctctttgccatcgttgatgtatttatatctagataataatcagttcacagggcatatacctgcaatctcatcatattccttgcggtctctatttttgtgctacaacaagctacagggcaatattccagaatcaattttcagtcttgtaaaccttacttacttatgtttatcatcaaacaacttcagtggtcctgtcaatttttcactcttctccaactttcaaaatctgaaaagtctttatctttcgcagttaagtcaattatccctcaactttgaatcaagtgccaattatagtttctccagcttactgcaactggacttctcttttatgagcttaacagaatttccaaaattatcaggaaaagtcccaattttgaaaatcctgaatctggccaacaacaaattgaatggaacagtgcctagttggttgcacaaaatggattctttatctgctttgatcctatcccataacatgttgacaacaccaatggaccaattctcaaggaattaccaactcacaatcctagatctaagtttcaacttactcactggcagcatctcttactcaatttgcaacgcaagttcaatggaggctctcgacttgcatcacaacaagttaacaggcattattccacaatgcctcgtgaacttaccacatcttcaagttttgaatcttcaaatgaacaaactttatggcactttgccaagtactttttcaaggaacaacaggctaagtacgctgaatctcaatgataaccaattagaaggtattttgccagaatctttgtccaactgcacactactggaggttttaaatcttggcaacaatcaaatagaggatacatttccccgttggcttcaaaaactaccacatttgaaagtattggttttgcgggccaacaagtttcacggtctcattgccagttttaaggccaaccatggatttcccagtttaattgtttttgatatctcatccaacaacttcagcggcccaataccaaaagcctacatacaaaattttgaagccatgaagaatatcattcaagatgaagtggatagcagttcacagcaatacatgcaaacgcaatttagtcttggaacatacgcttcgtctgtgactgtaacaatgaaaggcatgagtatgccacttacaaaaattccaacaaactttgtaagcattgatttatcaggaaacaaatttgaaggagagattccaaatgttattggagagcttcatgcactcaaagggctcaacctttcccataacagacttagtggtcttattccccaatccatgggaaatttgacaaacttggaatcattggatctctcttcaaatatgctcaatggtaggatacctacagaattaaccaatctgaactttctctccttccttaatctttcccataactatcttgtgggagaaatacctcaaggaaaacagttcaatactttttcaaatgattcctatgagggaaacttggggttatgtggagtcccattgtcaaggaaatgcagtaaggaccctgaacaaaattctcctccaccttcacagaccctttggagagaagagaaatttggatttggttggcaaccagtggccataggatatggatgtggaatggtatttggagtgggcatgggatgctttgtgttgttaataggaaagcctcaatggattgtgagaaaggttggaccttaacttaatcagaaggtgaaaaggaacacgttgtataagactcatggaagaataaatcagctcaagctgctgtcatagttaatgcgttttcttttcctctgtttttattgtcgtgaatttgtaaaactatttctaagatatataaatctagcaagtttgtgctcagtgtacatatattaaaatagttgaatgtgtattcacgattgatgttgtaatttaattataaagtatcgtcttaattatttttaataattatttttaaaattaataaatttatatatataataaattgtgattagatgattatataaaaaaattatattgtaaatgtaggtttaaagtcatctctgttatataaatttaaattttacttaacagtaatttttcatttatttactaattgaatgcttaataaagtatgttaattaattgatcccattttgtttatgcgcaatatttattttgtgtgaatgataccaatctcattaattatttcgttaacatgtttatttttattaacagcaaataatatttcataaatgatcatttatactgacgtttttaacgatgccaacaccattttataaggtaaacactctcaaatctcattggtccatctccctcgttcttcctttgaaatgcatttttaggtcacacatgttcatatttaacttgttctgtttttccatgtttgtatcggaagaacttgctattttgtaggaaaaataacacaaatcaaataaaaatcaaatgttataaaatggaatgctattaagaaaacaaagtttaaatctagaatattatctacacattgaatttatgcttctagaaaatttatatttctatataaaaaatatagaattggttttttcaatctctatatactttactgtttattattattttgttttggttataaaatattaatatgaaatatcaatattataaattactatttacttttttttattaaagagtttaggtgagttgaattatgaggcaaaaaaaattagattcaatttggacatctaaaatgaaattcaagcttgatgaaagtttaatttccaggacttttaatgtcttaacctaaattagaacatgattgaattgagttaaaaagatccaatttaatttataatcaaagtttaaagcacaagtccacatttcatcaaattagttctatcatgttgatacctaacctatttttatcacctttattcattgtttgtattaggagttaaatagagagagaaaataacaaggataaaaataaaaagcaaaataggatataaaagatatattgtttggatgaatattacaagtgaatctaactataaaataacacttaaaaatatttttatgttataaattttatttatttattttaaaaaaaaaagtttcatgcctacatatgaaccaattttatctctagggatggaaacaattttctcgtaggatccaaaaaaagttctttacttcccttttattgaatgatgaagaaacatcttctaaaagaaacaaaaatgacaaacaagcatagaaagttaataagttccattttctccttaattcgttgtatcctatttcgccttaaacaagcaataggttaatgaaaagtgaaggagaaacattaaagactaatttattggtaattttgaaaaatattttatagaaaaatgtataataaatgatttatatattttaagaataaaaatagatatattaaaaaattaaaacataataataataataataataatttgattaggtattcataaagaaaaatttattaaaaatcaaaaaataaaattcactaatttatcatccacctaaaatatatttaagaaaaaaattgaaatagttgaatataaaatataaaattgaaaataaaatacaacccacttgttgcgccgaacctgggatctggcaagtaggatctaccaagtcctaccaatgcacgcgccacctcttccagtttccacgattcccttcaaaaccctaattttactccaattctccgtttcacatttgcaatttttgattcccagacacccaaaatataaattatttggtgcatatacgtttttttttctttttttcttttttgatgttccccttcctgtgttgcataacacaacctattcttttaccactctgtgatacccatttgattactaagcaaaatacaactactctctcagtttaattgagttcatttacagttctttgcatcaaattttgattttgaattggtgggtgtttttcttctgttatgagtgatgatggcactcgaatcttgggttctcagtcaccaagtgttcacctccagttccagattgttttgccctgcgcatgagaataggcgaaagagcttaccaatcaaagttttgggtagaaccactagatacccatttccctttgtgcccaattgtgttgctccatctacttttacaatgcttcaggcttcaagttttggagcagatgccaagttactagatagaactcggttgaggtgtttaggtagtagccgcaattgtttgagcgatagaaatgccgtttccaaagccaatttgaactttatacaggaattgttaaagaggggaatcatcctggctgcaactgtttgtggggtattggtgtttggatgttcacgagtttttgccgttgaaggggttgtgaatgcaggatatggtgtttttggacagagcattcttttgcttaggaatacatggcctaaagtgttgcaagttctttgtatatttaaggagcaaggtttggtgttggcagtgcttttgggcctttcagcttttttctcgatggcagagacttcaatcactacactttggccttggaaggtatctatcttgtttatgttatcctcctttttctgaatgataatttatgttacatgaaagtaggagctatgcctaggcaaaaaaaaactctttttacaccgccattattcagtatagacctattaaataattatatggaagttgaccaaaggattgttgccagccttgattggatggggacattgctgacagtgaaatttgttttgatatccaattgctgaaagtttatcaattttgaagaaatgaagtttggatcttgcatgagatcatactgaccagaaattcatctgccatctacctgagtgcaacaccaagatttcttgtgctaattatgcagaatttatgaatgactaaaagttagggatttcataactgatgtatatgttagtaaggaaattaaatgctgtgatttaaggatcaactactagtctattatatttccttttcttttcaaaaatgttttttgttcttttaacatgcttgcagattttgcacatcagatttgttattcactatgattaatttagctgattaaagtttgaacattgaattctaatatctgttgatgacaatgtgtaaggttcgtgagttggccgaaaaggagtctgaaaatggtgtcttcagactactccgaagtgatgttactcggttccttacaacaatacttattggcacaacgtattctcctggcattgatcttattattgaaaaatgtcctattttttttcagtgtagaatgtttctcatgctagtattttgttgtatgcagggtggtcaatattggggcaactgctctggtcactgaagcagcaactgctatgtttggtgaagctggtgtcagtgcagcaacaggagtgatgactgtatgttttgattttcttgctcaaatgttaaaaaaaatctactgtttctaggacatcaaaacatgcttaaagggcttatgcattgatttgattatctaaaattcagatgcactaggccacttgattattattcatttggaacattgaatctttcagtatatcaacatgctgcccattaaacttgcaaactcctgatgtgttgggaacaagaattttacatgtaaagcttgctagctttatcaccaatttgtgaaaaaggtgccttagctaacttttgagtaagatagaagaaaagagggggggggggggggggggggatccgttatttgaatttgtacatttaaaagctgtccatagacagaagtttagacaacattataggatatacctgtcttattttatgttatatttttcgttgttttgttataggatttacaatagaattataaattatcttttcaatcagatagattgcatcaaattgatcacaaaacagtgcatatggtgtgcaagtttgtatgctttcatgtaagttttttctcatatatctgatttctcttttctctttgtaatcaaacaaggttgccattttgcttctcactgaaatcactccaaaaagtatagctgttcataatgccacagaagtggctcggtttgtggtaagttgtaaatttcttgcctgttcttttataatatttgggaacagaaatgatgctgctgattagtcatttttgtttactttttcacacatcatccatatttacatgatatttctgcctcaacttcttttgtaacaaatattgatattgatattgatcctaatgcctctaggtcaggccagtggcatggctttccctggtgttgtatcctgtaggaagaattgttacttatctttcaatggggatgctgaaattgcttggcctaaaaggaataaggtctgttgaaaagattgccagagattaatcttcttttatcatattatatctatttcttttgcttctttatagatgttttgtgaaatctaattttaatctgatactaactaaatcttagttccttcatcttaaggatggtgctcttttattttcacccatgctccatgataactgttcatttcctaaggttgattttttcctaaatgttatgataaagagaacaaatggggaaatgagattattttattaattatgagggatttatatgtggtagatggttgataacagttcttctgttttttggtttctaatttggtcgaatgatgtagcacaaggcagtaactgttttttttccttccctttatgtaatgttgaaccctggtttgaaagagcaactgtggtttgccaacttagtatgtaaatcatgtggaaagtggcatccgtttgttgaagcaatggttgttggacatattctcgttgatttttttgaaattcaacactgaagtcattgcttactttaccagtgagccatatgtaactgaagatgagctaaaattgatgctaagaggtgcagaattaagtggggcaatagaggaggaagaacaggtaatgaatattgggtttaatattctaataatatcactatatatttgtcttcaaaatgtttagccttttctgtcatttatagaaaacaaaaattcctttttataaagatttccaaacatcaatattgtttattgtaataaaaatactaaattagtttaaaaaaacgaactaatgtttttgaaaaaaaatatattattgagtcatatgaattaaaaaaagtttctttttcactaggaatttcgttattggtccgttttaagtttatactttgtaatgtttgaaaaaaccgctagaactactcttttaaggaaaaaatatagaaattaataattcgaaatccatttttgaattgagatttgaattaaacattgattgatgttttcttcgaaaattacgacaattcaatttgagtttttatgttgtaaggaaaaagataataggtaacaagtaataattttgtttattttgataacatttgaaatgaaatattgtattacggtttttataaaaaaaaactttttttccaatacaagcaagctaggggaaaggagtcttgagacttgcatttaattctaaattctatgcatcaataggtttgttctaaaaaatgttgtatgtaaatattttcgtctcggattccagtagtgaaaaggaaatcaataaattagcataaataaattttcaatttttcgtatggaaatgagcccccatcatattttctaataatgatgtatgttactctattgtcatgcttctttataacacttgcaaaagccttatcttcattgattgttgtagatattttaatccacttttatgtctgttaaaatttaagcatctcacatatatataatatattacaggatatgattgaaaatgtgttagagataaaagacacacatgtcagagaggttatgacacctcttgttgatgttgttgcaattgatgcaagttcaagcctggtagactttcatcacttgtgggtcacacatcagtactcaaggtatttgaagatttcctgatttcaaatttacagtgattttacttttccaatgtgctaactagatcttgacgtgtttcctagagtacctgtttttgagcaacgtgttgataatataatgggtatcgcatatgcaatggatctgctggattatgttcaaaaggttaggagattttactcatcatgtttattgagttacaagtgctttacttattaattatatatcccccaatctcatagtctgtagaattatgatctgtttgattttgaagggtgagttgctagaaagtactacagttggagatatggctcacaagcctgcttattttgtacctggtaactttttttcatcattcatcttgagattacctatgttcacccgtattcatgcaatgcaatgtagccacagtacatataaaacattatttattttacctgatgattataattgggccagctatgctaggtgaggaacaacaaaaaagcagcaatactctattagatctattgtcagactttttttacatttagcattttgttaatctaaattgctggtgaattaaagcaagtcttttattcacccattgcattgtcatctttgctgtgttgattgtgttgctccatatatttcagtgcattttcagaatagattctggaggctctgaattgtcattctgaccaattcagcatttcttttaaaatttaaaaatgctaatatgctatctttgcttcatcaagatatctttttttcattgataaatttcgcaatatctttaattccctgtcataaacttataatataaacacaccaattggaagggtagcaggggaatgttcaacaatttggctttctgtcatgtgctagtattttatgatgaattattccttaatgtatggacaaagaattaagcagcagctgacttgctatgtcttgactgaacttaatgatcacaatccctgattttctcctcctattgaaattgaattgttaaactggttgatttgtctgggataggaatacatttatatcttttaacttggtgcagaatgttaataaattattattacgatttgcagattcaatgtctgtttggaatcttcttagagagttcagaatcaggaaggttcacatggcggttgttcttaatgagtatggtggaactgtgggggtatgtgcacaccagtccagaatacaaccaactcggatctttttgtctgacataaatgtgaatataaatctgtaaatttatgattcactggtgatatatacactgctaattacaaccattgacccaaaaagaagtatatgaaagatatcaatttgaacatgctattcctattcgtttagtttctttcaaaatcttttccaattatttatcaacctcttttttatgctaatttgaaatcaaagcaaacagaatcaacattgagatcattcccgtcatcatgaactattgcaagaatattcataaataatcctgtagaaatattagtttttatacatgtctaactgtgctacagctgtactcttgtaatatgttgtaccatactgtgtcttgtgctataatataatttaattattttttctcttactttacagatccaaaatcattgtaataaaaccaaaagtctttctggttacaaggcaggctattctgatttctaaatgttcttatttacccactattctcatcttccacttgcctttatctttccttgttcttgttacaattaagtttgaatatctaatggcagtgtttcttggattctgagttcgtttttaaatgattttatggtccacccttccacacacctgttgcatttagcaaagactgggtgtagacataaatcgcttttattgatagctaaatcgagagagaaggtttagttcttcgaacagtttattagattgtaacttgactctccaagtcttctgaaatccattccatataatctgcttataagttctaacaattttcagtttatcaaatatagatgccttattgatatttccatctaacagattgtaactctcgaagatgttgttgaggaaattgttggtgaaatctttgatgaaaatgactcaaaggtaaatgcttgtgcttaatctttactttgtttcttttaaatatatttttaaataactgaaagtgaagcatatattgaattccttcatctttactctgtttcaccaaaaaaaagaaacaaaggatcctttttattctgcactctttgtccaacaacagttttgtatggaatatttatttgtgctgactgcataatctttgtatacctttctcagttatttttattgtcttataactatcaacaatttagatgctgacaaatctactgtttaatggctactagtggtgctttgctaaaagcccagcttgtgttttaggctatctattttcatggcttcagattgctataattcaaagcagttaaaaaatttcacgttttttcaagtaatacaacatgaacgaactttatataaattaacagaatttacagaagtaaagaaagaggtcaaactattgagatggatccgtgtttatttgaggaatgatgggtttatgatgttatttcataactaggaagtcttgtttggtaaaaataaataaaagtaaataaattgttcttggccatattcaatgttcaaatacaaactctccaaagcatcatagtgtaaatttgtgagtacgaaattaaagtaaatgagagggtaaccagtaatgatgtgtaaacgtgataataatgcatataagtgcaagaagggttctgggaagatgtcaagatagaattcaactttgttagcaaaacagagatcagtatacaatttaagctaggtttgattctgaggttgctagtaattctacacataatttctgggtaactgataaactaactcagactgaagatagaaaatgatttgtatgctgaataataacctttttgataaacaaaatgcagcaaaaacatctgttttgggagttgtaagtggtcactctagatttgattgtgttaaataatttcatttagtatagtattcgtgtcaggatgccctcagtaggcagagtgcaagttctgccaggaagaaaaaacaaaattatacattttgttcaattctatcattcctataagtttagtgtacattgcttactcttaatgtttaactgttcaagtcattgtctctaacagcagtaggacattaatgcactttgaatttagctattatcgcctaattatgcatttgattgttgatgactataactatttgtttgctaatttttcattaaagaaagtttttacattctgtcctggtgattcctacaggaggagatacagaaaaaaactggctacatagtaatgcgagctgagggtgtttttgatgtggatgcaaacacttccattgatcagctctctgaagatttgaacatcaagatgccagaggtttagccccttttttacatgcaactgacatatttgtcttctcatgaccctgcttatttgactggagctagtgtgactttcttagttgcactatctagtcagtttatccttaaaaggggaaaaaatccaagatcacaattagtagtatagcaataattaagttgttcatgaatttgccattcagagtcattgtagacccatctttgcatctcaaataggcatccgctccattggatttcaaataggcatcatgccaacacatttcttatgctagcttgttatttctacacaagttgtggactaaattgggaaaatttgcaaactgcattatatttttggagaaatttatgctgataacaattgggtttcatgaatcctggggtttagatttgagttgacagcattgcaaaaaatccaagtcccacatcgactaaagataaaacaagatagagtatataagtgaagggcaaccctcaccccttgagctagttttgggggttgagttaggcctaaactcatattctaagaatctaagatggtatcagagcatatccaagatttcattcaaagggtcacccaccatgttatccatgcaccaaactcaaaagtgctaggcgtgagggggtgtattgaaaaaaattcaagtcccacgtcaactaaagataaagccaagatagagtccctcaccccttaagctctaattgataaacgaagcatcgtaaggatccattaacgcggttttgaaccgatacaaaactcacattctaagaatataagagacaaacaatgatctcattggaattaattttgcttacaattcatattgctaagtctgatgaagaatttcaggcctcctgatacgtaggtgacatctatttcagggtcaccaatatgagacggtatcaggctttgtgtgtgaagcatttggatacattccaagaacaggtgagtgcatcaaagtagttcttgaaagggaagatgaagatgataacaatgagtccaatgctgaccagcaggatcagaaggagaagaaccagattttcaaacttgaggtaatcaatctgttgctatcttaaattgccactcaagatagtcctattgatttttgcatatacagtccaaagttgaagagaatgaatggttagcactttgcacataaattacatcagcaagtataatgatagcataacacaactacagcatacttgcataagttgcatgtaccactttttagttttattactctacggttactcaagctacactaaagatgtcaatgtgattttcctcaaaaagcttgttcaacaagtttgtgctttgatttctggtttttgagcatatggttagtcattagtgaagcaatgtcagaggactcggtatattgtaccctatcaattctacagcttttccattttgtagggttctatgttgtcacgagattggaattatattttgcataatccttgctattttttaacttgtgtgagccacatttatagggtttcaaattaaaatgtttttatttttggcaatctgtatgaagtaataaactgaatctagaacttctccttagcctcccccatcccctttgtctttggaatagaaaacacgcagcttctttgtctttggtgcagatactagctggaaatgccagaaaggtgagcgctgttcggtttgaacgcataaataataatgatgaaatgttggagactaaagtaactcgcatggtccccaaaatcatgaaaagaaaatggagcagtgatgagaactcggacaatgatgcagaatatgacggagatacatttgcaaagagaccacaggatgacattcctagtgaatatttagttgatcaggaaaattctaacagaggttaagtttgttcgttcttcatatttttctcctttctttatacctggcatgcttttgtgccatttttgcaacagcctataagatggataaattatgatacatgtacaaaatgagaagcaatgagttcaagcatgtaaaaccttgcaaaagacgaattagaggagtctttgctaacgaaagtctttaaggctttggtgtaataaagatgtcaggtttttcaggtttgatcaaaacaatgaccattttttccaaccccctctcatacacacacacacactagcttagcactgctgaaacacagaaatttacttgtgtttcttcacaaatttaatggaattaattagaaacaactttcacttcctatcactgggaaagaatctgtcaccagattaaccagttggaaatagatgtttttatctctaccccaaattttaatccttatcaattaatgaacttcaaaattgtactttattcaatactattttactcttctttttttgaagtaatcctatttcactcttaactcccgcttgtaattctttatttataaaatattcaaggaacacatttttgtataaaaatatattataaaatagcattcttttttcattatgatgttatttgtttgaatatttttattttaaaagtaaatttgaaacggaacttaatataaaattcttaagataacgtagtcaaatgtacctttagggggcaaacagatcgagccaggaaacaacaaccaaacatgttttttttccacaaaaatttgtttgacacctttaaaagcaaatttaggcagtatgaaaggttcttagtgtttgaatttgtagatatgtaccatgattgttgtttcaatgttttcctcaaaatgtataaatgtgtacaagcatagtgaattttacttctctaatttttatttacctttaaatatgtgtgcgtttttaaattaaattggaagaagacataatttaattcccttgctattgatgctcgagctataaaaatcgttgttcttggtaagtggagaaaagaaaagagaaaggaaaacagaagaaactacaactgagggaattgaacttaaccctccacggcataagctatcaattcattccacggcataagctatctattattatcatgatttttaccaccattattactaccaattgtgatatttttagatgtgataattgagatttaatttttacatattttttttttattttatgaatcttttagagatatggggttacataaaatttaattaaaaatttaatctcaatgttatattatttttaatcttgacataatgattattattagttattattatgttctcacttaacgaagtgcgttcacttgagtcggactatgtaaacagtttcattaaaatacatgtttaataaattcttatcaaatgaaaactttaaaatttaattttgaaatatactaaaattagttaaaagaaagacttatttaatttgatgaagtttacatataatatgttaaaataaattataaatatattataaagagatcacaaatatatttttttatataaattcaaatgaattatcccatatatttccatcatcatgaacaatttgaacaataaaacaatattaataatgggataatatatagatcgtgatagactaattaaaatttgacagtttagtttaaaaagattgtgcaacggatcgagattctacatcaggaaatgcatgttttctaaaagattcaaattaacataattgttatacaagttaaacaaacagatcataaaaaaatgctacttactctcatggggtacatcaaatttctacaaaatcaaacatacatggatacaattttatttaataattaatttaggaaaatattatcaaataaatcactttctaaccccacatatgaatattagaaataacacatatatcacacactataactagatgacgatacaaattcagattctaagttcacaagaatacgaattgaaagatggaatcataaccaataacatgcacgcatggctagccgatgaagttgtgaactctcttcaatcttcatgcatccttggccacaccttcttcctcaaacatgctgccaccacagctgcatctactacttctcccaaaaagaattaattaagccatgcatgtgttgtacaaataattaatactgataatttaggccatatttaatttaatttgtcactgaaataaaataaaaatgattttcgataaacataccatctgccatcgtgcatatggtcataatcttcttgtttcacttctcacagtggagtggtacggtacctcaattacgatcttttgcagcaccataataataagtagaacatttcataattaacaaccttatgtgtacatgtatatcaagaattagctgaaacttatacagaatcatcaaaacagaacgttaaattctggaattgtagataagtcaacttgaaactttcttgacccagagaaagaaaaaaaaaactgaaattcaatgagttaagcaagttgtttaccctcagtcataagtcatattctcctcaaattagtgaaagagcttaattaagttcagtttcttcttaattagaagtacgatgatccaccatcagacacacatgtgtatatatataaagtatgtgttcaactaattaacttgctacattggcgcgatcttatggattcaacgcggttgccataccgcattatcaaaccaaaaataagtcaacctgattatgttaaaaatcattattgaatcacgtggatggagatgcataattttattttatttttaaaaaaaatgctttctttccgtgaaatatgaatatttaataaattataaaaatcttttaattgccatgaacaaattaagatgtaattttttttctttttcttttgtaattttcagcagtacatttatctgttaccactcacgacccaagaatacattctgataacgttattctcttttttttttaaatgtaatacgacgatgacactgttaccgaagtcatcattttatcaattgattatgtcattacggaatctgacttgtaagttgtaacgtgttgtgatcgtctgagaaccatgcgtgggactcgtgcatgcaacccttcttgataggagtgtttgtagtttggattggattggttttgaagtaaaaaattatccgatccaatctttttagtttggtcatttaatcatttattcagtttgaattttttccatccaatccaatctaatttttttcggtttggattggatcgatctttgattttttaaaaaaatttaaaaataaaacttatgagacttatttttatcaaaataaggagtatctaggataaaaaagcacatttattgaacaaaaataaatatcattttctaatttttattggacaaacatatttattggacaaaataaggaacaatgtattgggtttttgatttttgggctatgatagggaataggcccaagtaggtaaaaggtaaggtaaggtttataattggatcggtttggattggatcggttttcaccaattaaaccgaaaaccaatttaatccagtaaaaaatttcgattttttagattttcagtttttcgatttttcagtttttcggttattttggttatgaatttttcgattcggtcaccgtggtttagatcggttgatgaacacccctactccttgatagtatcttaattacaaattcatcattcaaaagtcaaaactttattcacaagtattttctatttcttttaagatagaataatggacatttggatattacgtacgctaaacatgtgacttatagatgtatttttaaaaggaaactatatactgttaataagtcaattcaatagctgataaaaaaatcaattcaataaagaaagaattcaattttcatatataaagttaatgtaaaaaaatgaatttgtctgattgactaaagtaaaaatgagattaactcatcttgaataactaatagaatttagataattatcttaatataaaattttatcattaatgttaactaccacatttaatacatcatctttaatttttttatatcatttatgtataaataaaaactttatatttgttaattaaaagctaataattattttataattcactttaagtaaatagttattataaaaaaataaaatttaggaaaatagtttcattattttacaacttcaaagtataataccttaaacaattttccatcattttcattataacttttaattaaaaattatagataaagagtataaattttattaaaagttatagataaaaattataaaattaaaattacagccatacatatttttcctaaggtgaataaagaatataaaaattaaaaaacaattattaagattttattattttataattttattacatatatatttatgtattttattataattttaattatcaaattttaattttacacataaattatataaacaaattaaagatggaacattaaatgtgatattcatagcattggttaaattcaaagtaagataattatctaaattatattgattattgaatataagattgtttaactccatttttaattgcggtcaattagaaaaatccatagaaaaattatacaatcaattaatcattaattattttatatattgtttgcaaaaattaataaactttttctaaaaggacaaaacaaatcaataaacttaacatatacagcgattatgtaatttgatcacaatgtaaaaaaaaatatgtaaacttacaaataaatttatatatatacatacatatacatatatatatatatatatatatatacacacgtatgtgtgtgtgacttttattaaaaatagtttatatgtgcattatttaattcgacacaaatatcttataacagaacgcgtatcatatgtaaattgataatttgattatcagtgtgaaagatttgtgcgtggattaattgactaaaatatgcaaagccaactgaggacagatggaacgaatctaattaagtaagaccatactaattaaattattaattaatgtcaataattgagggagcctgatatttttttatactaagattaaatataggtttataataattcatataataagttcaactaattgagttaatttttttggctgagggagtatgatatcttcatagagtgcatgaaaatcatttaatttaaatttatttaaaattatgattaaaaacttatacatttctgtaaaaaaaaaaaaaacttattaataagtactgtaaaataaaaatttgagcgtcaaatgtcaataattccttaatgatgaattaacatttaaatataaatataaatagaaaaaatatgggtgttgttgacttctgaaactaatattttatctggtcacaccacaggggcgcaaccttatgtggcaacggttctcttcttcgatccctttcttgcacgtgttgttaatcttacatgttatgctccctcttcagcctttacacttcgtttttaggtcagaaatctattaaaacagggagtcacaacttcacaggaattatatgtctaacttttcattctaacaaggagatatatactatgcattagaattcatttttcaatatttcttttgtttatataataaaaactcagtataactaacctctaaaattctcaggatgagtctgcagactacaagtgacaaatcaacttattttactcatgcttaatttattggtatgccttttgtttcacacaatattaggtgaacaaaacaaatatgtagacccaaatagatagatgttcatgtactaaaaatatccatagacactcatgtattgtcaatctatacggatatacctaaagaaagaaaagtatagatatgatatgagatgttacgtgacaagaaaaaaagataaagagaaataaagagtttcaatcaaatatttacagtgagtgagtgtttacatatctatattctacatatgcaacatgttactatcctagcatgcatactaaataggcaatacaaaaagcttaaattttattgaatttactttagattaaaaaccctctcgtgacttaattttttattttttagttttaagcattattttttttatatatttttaacacatgatttaaattttggatattttaatgattttaaaatatgtcttaggtcacgtaatcttcgtcctgcgttaaaattaacgtagctcgcgtaagtgttgaatgcctggctagcagggcgtgacctacaacccactttgagattgggtttgaactttgaacagaaagactaacctgttttttatgcagcccaaaatggtcctaaaatattatcatctatagtccacaccatcgtaaaaaaaatgaaatactaaagagaaaaaacttagagaaatcaaataatataaaatgaatgtaccaaaaagtcattgtccgattgattctagattcaatcctctaaagtaaggtatcagtttaagtctgtttatgaaaagaaaaaaaaattgtaattgagaagagaaatttcactaaaagtgatcagtcaggtttttgacgtaaattaatcaccgataaatttaacaaatacttcacaccagtaacatattatccaagaaatataaaatgaatgtgatagagattttttttaatcctctcccgtggttttaatcagttttgggcttaattttgcaagataagctgtaatccaagaaaagagaaacccaaacacacaattaggtgttgtggttttctagtctagctacaattaatttgcatcctaattaactgctccatttgcggatcttgggatttattccagaaaaatgggtgcaattcagctgtaaccttagtgacatatatacacatcatgacaagaagattcattcaagagagtcactctccctttattggcatgcattttaatttctttcattcataattccctcttttaagttgacatacttggtcacttattcggtgctatcatggtagtgaaaaatctgacaacgacaacgctggaaaaagtaccatgtgatcaaaagccaaagtacaatacacgaaattctttgaataaaattccttacgaacctacaaacttgattggatcagtatgaacatttatgcattatttgaatcctaaaaatgttcactacacgcacattatacatcactggcagcacgtgtttttggaccacttttccaaaatatttgagtcaagtagacaaggttggccataggtatacgtagcttgtgtatgaagagtgggtgtgtttgaaacattggggcggggaaaggttgtgacgtaacggaaccattaatatgtatgtaccgttaatgtctctcatcttgtttgcaaccacatttatgtagtattgctgttaaagaagtagtagaatttttcttttttctttttttggtcttcgaagaaatcactaaagactcgttcaaataaaagtagacaaagtagacaataaggatatagtgatggcaactttacagagataataacgactactgctacgacctttatctttctaatgaaaatagtaaaaaaatacttaaagcaattaagatggcaagatattcatataattttgacaaatttatattatgagatattataattgcacaactctaattatacaaattgtgttttgaagatacaactcacccgaaaattaaaatatttccttaagccactctttattttctctctctactccactctttattttctctctctactctatatatttcgtcacatttagactatataacatcattatcattagatctctcccttattaagcttttacatacccacattaaacatatagcttactagagtgtcttagtatttgcaagtcaccactcatttctctctaaacaattattcaactcctccatcactaaattgttgaagcactctccaatccaccgcaattataaatccctctgacccattatattcccactgattatgttggattatcatcgataagttcaatttcttccattaaatctagaaaaaagttatgccatcccataaagaaagctaaatggataacaacattataaagaatattatcaaagctaacgcactatatatcaagctaaacaaaataaacttgttataattgaaaagaatattcaggcgactttgtagaacaaactcacgattatatttgacaagtaaaacacttgatctctatataaaaattaagcgtctctttggagcggtaatgatttttaatacatttttttatatatttttttcactttttttaaactaagaaaaacttttagtgaatttgatttttaatttaaaaacaaaacacacatttttcacatttgtaaatgacactttttgttgtcaataccactatcactattgtcatggattgctattgccaccgctaccattattaccattgttgtcactactataattgactatcaccaccacgatcactaacaatattatcatcattatcattgtcaccatcgtcgctaccaacattattaccaccaccactaccaatgtcatcattacaactactatcattgtcaccaccaccaccactaccatatccgtcatcgtaccgccaccaccctcaccaccaatgttgtcgcaaccactaccatcatcaccacttgttgccaatttaaatttcacaattcaacaccaccactatcctaccaacatcattgccgccaccacatatgtcatcgccactaccaccaacatcaatgtcattgccactcttatcgtcattgtcactacctccatcattgtatggtcaccaccccatcatcaacgttgctgcaaccaccaccaccaccacatcgtcaccactcactgccaccaccaacaccgctatcatcaccgacaccattgacatttctactactactttcgttgtcactaccactaataccattttcgttatcgttgttgtcaccaccaatactactatcaccaccatgttgtcattgccaatcttccaccacgaccaatgtcacctttaccaccaccaccaccatcgtcaccaccattggtactgccatcatgacctggtatcgttatcgtcaccaacatcattattgtcgtcaccaccatacaaaaacattcttaaattaattttaatatgataagaaatattttaaatgaaattatttgaaactagttatattttaagaactgatttaattttttaaaaaactaaaactaaaaattgattgtaattttttaaaaaaattgaaactcaaaactaaaaatcatcttaatagtacctaaataacctaattatacttttggtcaaatattttagggatacgggattttgatttctttagttttaattattcactttcagatttttttattattgaaattaagtgtctttacctcaaaatcatatctattaatttacataaatgtatcaattcaaaggtatgacgtataattgatttatataaaacaaaaaatattaaatttttaaacaacaaataaattgtacacaaactatttatttattttcacttaattattttatatatttttcttgtacaaatcagctatagatcacactcatatcacatttgtatgaaatattaaatgaaaatttagaataataaacctattcaaacaattagaaaactataaaaattaaatacgaaaaattaaaattagaaaactaaaatcatacatacataaactaaaaatggaagaactaaaatcacaattaagcctaacaaaaaccacttcgatcgagcattggccacaaatcaaggtttgagtttgaccacccgaaaggataagattatggaattgttgcctttcatttgatacccctccctgaggtagggtctaactaagtatataacgaatataaaaatgaagtgccaaatctgcatggacaagatcataaaataaaactcttggggatgttgtgggctctcccagaaattcgaggggcctccgtttagcatgacaaagaacacaactcaatgagtgtgctgtgtgcatacatggtgtggacctttcagcaattggctgtgtgatattgatttatttatgaactttttttatatttaaagaagatgtggcattgtcctatctatggttgtgtgtgttccctcccaaacaaattgaaatgtaaaatgtttgttccattctttcaccacaagtccacaaccaaccctttaatccttagcctctttccaaggcctgtattttccctcccttggtccccgctttacaagatttgagtttctgaatctcaaggatcttatgcaatggcacccattcaacttgggtccatatctttatctattttttaattccttaatgatttttttttttcaatttaatgatcattaaattaaaaatcaaagaaaactaaactctaactatagagaaaaaaaaaaaaaaaaacccaccttgtgtgactcaaaacttaggagacaggcatgacaaaaattgccgaacttgttgtgcagttgaagagttgaagtactaaattcagcatgttggattttccaaattattattatttttttttttggaaaaaaaaaagatggtgattctagtaggcttttttaccatatgaatgttttttttctcttaattactaaatggaataaatcgtgtcatgtgatatgatttttttttttcctttttttttattttcactaagaagtcatgccatgacatctgaatgcatattttaaaaaaaaaaaaatagaagtcatattacttagtatgatttatcttatttgataatttttttaaaactcactctaataagacaaaaaaaaagtccccactatgaaaaagccgaattctagtaattggggtagttccaagctcgaatattaagcaaaatattttgcctaagtatctgactattcaacatccgtgattttctagaaagttttaaattttaaaggaaaaaataaaaactgcagtcactactttaatataaagtgtgtagaggtcactatatttgattttgcaaaaaaaaaaaaaaaaagagagagagaaccataaatggtgtctttgctactacttggattctgagtcttttcaaaaagcatcactctgtttatttttggattaggatgtcacagctctctgaatgtaagtgaaggttattgtactgggagaaaaagtttgatgtggaatgagcaaaagttgaaaaaagtttcattcttgaaacatttgcagcattgtgtatatcctgttattcgatgggtatattgcttttgaagattttgtttttatttgtttgcttttttttattctctggacttggaaaaagtttgacctggaatgaggaaaagttgaaaaagtttctttcttagaaacatttgcagcactgtttatctccttctctttgatggatatgcaccttttgaagatttgattacctgataataagatgactgctatagagaataactataataaaaaataagataagatgtatattatattaactattatagataattattcaaaataatcttatactagacatatcttatataataacaactattcgttaagaaatctatcttatcaaatcctatatattttatctaattaacaactattcaaactgaaagtctaatattttctataattttgtttttaattatttgttcttttttaattctttctgggtagaaaaagtttggtgcggaaagaaagttgaaaaagtttcattcttgaaacatttgcaacactgtttatctcctgatctttgatgggtatgcagcttttgaagattttgtttttatttatttgttcttttttttattctttggggttagaaaaagtttggtgtgcattgagcaaaaattaaaaaagttccattcttgaaacatttacagcactatttatttcttgctctttgatgagtatgcagcttttgaagattttgtttttatttatttgttctttttttattctttggggtttacacagtcgtttgagattataccaacttttctttgttttgcaaaaaaaaaaaattggacctttagtcaccaatgttgaaatgtcagtgcccggtttttaatttgcaaatgctgattcgttttcttgtaaccatttgttctgttgcgactttctaatggtgtgtgtgattaatgcatgtggatatttctgagcgtgtttcgtactcgtttccatattaggagcaagacccatttctgggctgcattaaagttacttcctttttgggtgatgacagagaaaattgaggaaaatataatgcactgtggagtgttttcctattctaagacttaatcactgttcctgtattgctaggtttttttataatatttgattcttggaatagggcgcctttttgcacgagaacatcacctttttttttttttttttttgtttctgttggatttgtggaattacttcctcagaatttgtacacttttttttttggttttggttgtttagtcaattgttatggtatattaggttttcaattttgttttgtaagattgggactctggtttttttgtaccctatatatgtcttgtgctgaatctttgtgatgtggttttgttgtgtttctttgtgcttgttttgtgagcagtattcactaaattttgtttacgcgggctggactttttgcagtaacaagagaagagttatgtattctccatacacaagtatagtcttttataaaattcagaaatttgagccagagaatgctagaaagataattgattatatcttctttcaaggccatggagaacaagaaatggctaaactggcttcataccctgactatttcatccgtgaagtggcagttcaggccagaaaggaactccaaagattggatgctaaaccagatatgctcgcaatgtcacgtactgtaaaccctcagcaaggtttaagtgatttatcagtaatctcccctagaactcctacttcaccaaactttcaagtgcctcctccctattgggatccacaatctgctggcaacgtcaatccaaactttatgggaacgaattacttggattctattgtagaacttcagaagcagacacagatgctcactctggagaatcaaatagatgctgtaaaaactggaactggagggattgccaatgattactatggcttagatgcttctgctgccaatttgggtggaaaagctgggagaaggttttctgaaccaatgaagatatgtcactatttcaacaaaggattctgtaagcatggaacttgctgcagattctatcatgggcaagttgtccctgagaaattctctcagatgtatggaaatgatgatattagtgaggatcaggtgatttccccggggtcactggcacagttagagtctgaaattattgagctcctaagaacaaaaggcggtccaatgtcaattgcttccctgccaatggcatactacgataaatataaaaaggtactgcaagcagatggttatttaaccgagagccagcggcatggtaagtctggctatagtttgacaaagcttcttgcacgactgaacaataatattaggctaataggcaggtaaaggcttatgatttttttttttttttttgcatttattatttatttagtgtttgatgtttcttactctaatttggcttttgttgtggttaatttacagacctcacggacagcattcagtggttctggcagaagatgctcccacacaaatgcaaaagggagattttgctcgaaatatcagtgcttcacggcaaatatatctgacgttcccacctgacagcactttcacagaggatgatgtctcaaactacttcaagtatattacatcttttgttattaaagtgcatgttcccatttctttgcagttgttaattatttgcattaatgaactgacttttatatatttcctttgtagcacatttggacctgttgcaggtgtcagaattccaaaccagcagagaaggatgtttggatttgtgacatttgttcattcagaaactgtcaaaactgtttttgataaggggaatccccattgtgttggggattctcgggtgcttgtgaaagcttaccaggagaaggcaaaggttaatgaaaggtgaattccctgtcttttcctttcaatttttttttatattggaagttcttgtagttttatggtttgaaattctcatttattcctgtaaatgtagttattttaagttaatattgtaaaataaaagcttatattttttagtttgaaatgactacataattgtcatcaatattgctagagatagcataatttgatgaaaatttattccttgctgttgattacttgattcccttgttcttagttcttcctctttgttctcccctttccatttattgaaaaaaagagggcaagagacaaaggatgaaatccatgtgtctaatttacacaatcttttatttataatgagtcataaatacaatcaataatggttaccctaatttacataaatacacacagttccctaattacaatatttgcataatttctaacatatttacatagtctctcatacatgtttataaatcataggcaccaagtttatcacatgtaactaattgtgtttggtcctcatgaaatattggatcttaggcaatatggagctgcctgattgtcacatacatgtgtcatttgtgcaacttccccaaacctgaattctttgagcatctattttaatcacattagttcacaagtggctagggccatggcttaacattttgcttatgcattggatcttgcaacaacactcttatttttccaagaaatcatggtatcaccaataagaatgtgccagaagtgataccctgtcagtagggagagcctgctcaatctgcaatggaatatcccacaactctagtcgttcttttgtcgtcttacaggagaacttttctagcttcttcaatatattgtaggatgcaaattgctgcatccagtgtccttcacagggaggattaagtatttgacttaccacattgactataaaagagatatctggatgagtaatagtgagttagttcagtcttctaaccaatggctcaccctaaatggtagaagcttggcattaggatccataggagtgtctacaggtttagcatccatcaacttgtctcctctaagatatccattgcattctttctttgggaaatgacaataccattcttggattgtgtcacctctattcccaagaaatattgaaccttgccaagatattgtccaaaatgtagaaagagatgttgctttacatgtacaatacaataatgttgttgtcaacatacacaaccaagtaaatcaatcctgtgactgaatagcaagtgcattgtttgaagtgtgaaaactagtctgctctgtctctctctattctttaaatgcaaagtaagatggacaaatgtagtatattgaattggtatttacatctaaagaaatcttacgtgcttctgcttatataccttttggtataattctcttgggcattgttaatgtcttcttttccccataatactttcagtgttcatttcaatttggatgcaggaagtacacagatagaattgagcaccctgtttgttattcaccacgctctgtagatgtcgacactgaacttaactcaagtatgacattatctagtttataacccaaattatttcttatttcttatggttaacaattaacttcccaatgattggttttctcatccaagttatttaatgatctgctttctttctgttcccttttgtgggagaagcctttgtacaatctaatgcataattataatttatttagttccaagaagttttgggaaccatagatccattaggagacagccacaactaattgaagaggaagaacaggagcaagtcctggaacttcagaggagaagtcttgcacagctgccgtttgcccaaaaatctttctccagttcacctcattttggcttctccatggatgagtcaaggatttcagatggtgtgtgataatatatgttacatttctatttatcaagtttctgtatgttctaactatcattctgagttatattgattgaaataatttctcatgcagatcacttcaatttccagccagcagaagaatctttcagttttccactgcatgccaaatccaggcatacagactccaattactctggtgaggacaggtatgcatcaatttccaatagacttctctccctctcacattctacttcctacctgttttgtatacattaggcttaattgtactttttgtttctctactatggtcgctgggattttgttcccctaataatttttttattgaatttagtccttcagttttttgttattataatcaagtcctttcctatataagttttcttttttatctaaaactctcaaattctcaacttttgtttgaaaatctctatgaaccagatccattaaaccattttaaatcatcttttgttcaaaaccaagcaattgatacattattttaaatcatcttttgatcccaaatttttgtctttgaaacctcaacattgtacactataaaatgttacacattttatcaaattttgtattgtgaacctttgaagtcattttctatctcattcattttaaatttctagttatttgagttgtaaataactatttgagggttttatttaaatagaaatgatagaaggatttgattgtaaccattctgatatatctctataccatagccaaaccggtaaatcccataaacaatagttcctttcatgatttgtaaaacactaacagtatatttggatggagtattttaaaatttcaggaaatttaaaattcaggaaaattaaaatgcatcaattaaaattcttttattttcaaaattctgtgtttggataaagaaattaaatttcttcattttcaaaattttgtgtttggataaagaaattgaatttcttcgtttttaaaattttgaacctcatgcatgaaaaagaaattgtacttgtgttgggacggagcaaaaagttgtgcagttagagcttctagaaaagaagagaatttcaatttctcacctttttagaaggaaattcaaattccacatttttagttgtttaaaattctgttttaaaattcaaaaaatttaaattcctcacataaaaatatccaaacagtgaattttaaattgaagaattttaaattccctaataaattactttccccaattaaaattttctatccaaacacactctaaaagagatttgtaaaacactaaaagttttctttcatgatcttggctggagtagaacaccattcgttttgtcaagtagcaaatacgagacatagtaaaagttacctctgcttgtttacaatttctgtgtggatgatatcatttgtttgcaaacatgcagttttgctgctatacttttcctgaaatattttgttgactatggataatgttatttatttactttttaatttttatccagcagtcaaggactcaatctcccggacagtccattcgcattttcactagatagtgggaggtaaacagtcatagtttcagatacatatacaagaaatatagagtccaaacagaatcaggccaatggtcgcagctttcttttgatacacaatatagttcttctatggaaatatttctcaattagtgcagtaattttagtcaaaattccagctagtgcatacatgctgaagaagagacactggaagaattttctcttcacaattggaattggtggcattaacaaaagttaaatgatacatgtaagaaggttatagcttttagttacatagcttttagttacagataggtggcaaaacgtttgaattttagatcatatagttatgagttttattcatgaagtcattagtaaaagtactaggtatattattgtccaaagttttaattagattgaaggagctcttagaatccgtgtctatgttttgaggaactaatttacttactatgaaccgctttaataatggtttattgcaagtccattaaaaaaaaaaaaattaaaactacgtaccagagatttcatgcatgtgcaggtaagggggagagatattatacagtcttattcttgcatatgcaaagagattgtttttggatttgaattcatgaccaacaagtcatgggttactaaactagaaatacatagtaagttatgctaaagtagaatcttgaattattgttcagggttgtcatgttttcaggttgaatttttctcactttaaaccactacaaattccatccccaaaaaccatattttgattgtgcatcaactatatcaactgtatttaaactgttagataatccttggtgatgacattactgttaccatctctattactgttatcatctctatttaaactgttagataatcctaatcggtgatgacattactgttaccatctctattatagaaccgtacattgagattttcacttcatacggttgtttcccctacataactttctatctcaaagaaaaagtatattatcgtttataatgctaatgctagataagaagcttgattgttttagcttgcttttgcatcatcaattactgttcaattttcttcatgtaattttcgctgggaaaatatgcttaacgaatgtgaggtattacatgatttaggctagcaggaccaagataactcgagtaaaatatatgagaagtatgaagctcatacagagaccattattcattgtgcatatacgatacgaacaatattagtcacaattcacaaacgaaactttataacaccagcaagataaagtttggaagatggtaaaaaaataaaccaaaatcacttttcgtcattgatgaggaaacaatcattaaataaagcttgccagagcatcatcgtccattccattgtaagcaacatgacaaaagttatacgagccagaaaacaatttttaatttgttaatatttggatggcaatttatttgaacgtgtacctatattgaaaacaatgtttaatgtaatgaaccttaattttaacctgtctcttgcatcatctgctattcctgtgaaatcttaatttcaaaaaattaatccatttccaagcatgtgctaataatttctcgtcatttcttccctgtaatcatccaaaaagtatcttccatatccagttaatgatgcggatacctttgtttttatcataataaaaatatcaatctctaacatgaatctacccatgtttgattataagaaattactttattcattcttctgagaatacacgactgataaattacaccaactcaacataaaccaagcaaccccctccccaaaaataaataaatccagaagatagaattcaattactagtactgaagataaaatgaatgttatttcaactcatacatgtgatacaaatggccgcggggtgacaaaaaaattatgtattggtctggtgcaggtgacaaaggtaacagaagccctactgatctcagatacacaaaagaatgaaaacagtaaaaagatatatctacacaaacacatcgttggaggtaaaaaggaaacatgagagtagcgatgacagaatccataagctggatcttagagttaaaattgatacaccttcaatttataccaataaaagtttgcaatatggtccacaacctgcgatatgttagagacttatggttaataacagcatacttaatgtattaattattaactaacaaaccagctcaccttagggtgacaaatttcaccatgatgtgttctgcttttcagccacaagcacagcaataaaaaacttcacaaaagtagttgggcagcttctgctgagaatcagacactgatacttgagtgtgtcatgaaatcatgtgatgacagtatgccaaatagccagctaaactctaattattgagcttcagccacaatgcagaccatcacgaaaattttatagcaacatgttgcatgacaataatattacaacagattcttcttccagtattcatgcaagttgacagatacaaacttgattctgatctgtcacatttttctttcatatttctcagcaaactttttaagtaataatctctgacgaaatgccaaatatttatccaaactagttccagcccactgttggcaaaagcattcatcagttggaactagagatccaagtggaaatggtccttttggagctttctttagggaaaccaagaacctatgacgaggacgaattctctggtctaaagataagctaagatacatcgggtatttggtcaaggattgcacctcattgttaagttcattaaccaagtacaaatatttgggctttagattctcctccaaggacagagatagcacctgcaggcacattagtcaacattaacaagagatacaaactgttcttcacattataagtatgaatccaaaatatacaaaaatatacaacaatgtcatataacaatatattattttcctagttctatttgtgcaaatgtagggcatcctacaaaaacagtataaattggaaaggaggaatcgaaattaggaacggtaaaacagaataattttcataaactaatgagggaaatgcatgcaaaatgacctgtgttaggctagtcaaaactttcacaatgtctgaatttttcattcctatgctccttaggaaatttattcttggaagtaatccatcatctatgctgtaatggagaagttggggatgttttgtcaccatcttcacaatgctatctctgggtgcacccaactctttggtaagaaatatacaacgagtattccatgaaatgtcaattctctgcacaagaatctggggactaagctgaatgaccttacccaaatctttttccttgataccaacttcctcaattaaatacctaaccgtaggttttaacgaattctcaacactataagaaaacaaggatggagcagcagcaacaatttgccctattctagaattaggtatgcccaggcccctcaagaaagcaacacgagacttcaaattgttctccactgtatactcaagaatttgtggctgcctcaaaaggattcttcttacatctctttgtttaacaccaatactcaataagtattctaacctttcctgtgcggaacacacattaatttgaagtgattgcatgcgtctctcatacatttggacaaagtgtgattccttcattccaaaagtgcttaagtaatcaagaagtggtaaccatttcacatccaaaggaatctcctcggacaaccgcggatattttttatcctttacatttctactatgctgcaacttgaaaaaagaaagataaataaacataaggttcaagagcaccacaagtacattaaatggcacaatttgacagttcacagcttactgtatcacgatttggtacctttccactctcatttctttgtaaggatgctactctctcacttctaggcaatctaatgctttgttcattgtcaaaagatctcaaaccccactcctgttcctgttgcctatcttttcctgcacaaacaagagtctgaatattcaacttccccccttaaaactaataatcaatataacattttcaagcatacctttagttgtctttgacttaaatctcttgttgttattaccatctaagttagcaggctcagaaaattcctcctgcacacatgttccacaatgaaagggaaaattaacaaataaagaaacaatcatcatcaatatcaaatttcaacagataattaaacattcctcagttttttacattggactaaagaaacaattcaaatgcataattaaaaaacccacttcacccatcaattgaattagatattcatcctagaatttaaagaaaacttttgaccacacacaatgaaatcacaaagctcacatcagaaagccaatcatcatcgtcgtcctcgttgtcgtcgacgtccaactcttcatcgtcttcgtcgctatcgtacagcgacagtgcctctccatactttgacttcctgttgctcttgataatcctcggattggaatgtgctgcaagtttcaccaaattcttcaacctcgcagaacccaaacgctctctctcaaaaatccaaaattgagaacaaaaactcgaaggagtcgaaaagtatagcaatggattataaggatagtgaggcataacagccgccattgttgcagagagaaacagaaaaagaatatactccaaaaccctaataatcagaatctctgcactcccagaggtttatcttctttctatctgaaacggtgtcgtttttacttaaaaccatatctgaaacatgagtcacacaatgtaacgcgtaggtggcgcgagcccgtgggctaaaaaagcccacgtggcattgtttataacggtttggttgttgtgaagtgtgaaatgaacgagcttggtcagttagttaccgtaccatggaagcagtatcttcttctttgtctctgctttcgttagggagtgtgaaaactaggagcaaagtctcacagaactgtcatgtgactcaacaaagacaacgttgtaataatgtttgtgttaagaatgcaagaagaacaagggtggctgctgtgcctgtgaatgttgatgatgtaaccacagtacttgaccctgccccagtggaagtcacatggcaaattgtggttggagctataggtaccttaagtcacacagcacaacctttgatattttactttacttgtgatgtttgtttttataggacaaacaaaactttggatgcagtttattaggtgtttttgatattgttattcttaaatcaaattagagattttttttttatcaataatctgcttaataaagatttgcattaaacatgttatcgagatgaaacttcaattctgatttgagagcagcaccaaaagactgcagttatattttgtgcttatctttatggaaagagaacggtgttccgaaattgggttttgattttgtgtgtttgaattttgcagctggggttaccccttttgtggtggcagggattgaatttagcaaaagaattgtaagtcagtcttttggttgagctgctaactcataagttatgaagcccgtgtgtttcatgccttcattgttggataatgttacagttagctcaaaaaagatgtgaggtgtgtggagggtcagggcttgttcttagggaaaaggaaaaggactatctccgttgcccagaatgtggtatgatagcattcacttcttcttctcatatcatgtactctatttaaccaattaagtatgcagctgggagaatgttattgtatgtctctgaaatattcctgatttatggggctttctgatgtctcagtaattgaacatcaaattcagtatcttgaatgtgtgtagttataaattatttggatttacattgaacacctaggaattgcagaaatccctgcattcccaagctaatttgaatatctattgtcaacctgagaatattttgatgttgaaaaggagatatttttcatagatcctctttcttttggttcacagtttctttcattttggttatgagcagctatgacaagtgtatgatggtgaattctagcgtttctttagtaattccactccagcagtgtaattaaagtaccattggttggtctcactcatgaaacttctgtttcaaacccttaattattctgaaagtttaaagagaaaggaataactggatttcacaaccataatatcaatttagaaactttgtaaattatgatcattagtctgacctgtaccaataacgttacttctcattgctttgttgtttccctatttttcttgtcatttatgttttgttgatcaacttttaactaagttattcgtgtcaaattgattaccttacagtccttcatgtgctgtatatcgcaggtgggtttcttccttggcaatcctggaaaagattcttctccggttaatttctacagcattgtactaaaaagcatacttcaacaatgacaactttattttagcagagattctctgtttgtgataacattctctattatacacaaatgtaaacaacatagtaaagccatttgcaatgattaccaaataaattttttttaaaaaacattgtaattccttttttgagagaaatggtatttgctaccttattgatatactcaccctaggaaaaaatttgggtgcatcaatgatgaaaaataagaatgaggacttccttctgtgataagatcaagctgctgcacatatatccgatggctgatttcataacaatgtagcttgttaccaatattagactattattttttatgctattggaggcattttaaaggtgaagtcttgatatttggactgttttttttgaagtggtagaagcttggttttctagctgttttttcattgtaggttgttcctgtgtctaggattctgattgaattgactccaattttcagtaatattcacatggataggatgtaatcagactggcttacacagtaaatgcattaaattgatagagcaaggatttaaagccaatactagtgaatttagcttgggaagcatgagcaagccattattgcattttctgtcgcatacattgtggacttaatatattttaaaagaacttttaatgcaactacgcgattaataaaatttaaaatgtgagaagttactaaatgtgttactacttgttactatcttacaagtttgagaacagatgtttatttgaccttatccctttttccaaataatgtatattcttaacaccaatcatgcccaaattctccaagttttaccgtctatttcaagctacggatagttgttgaacgaatccagaattgaaaaacagatgcctcttgtaaagtctctcgaggccattttatcattttgaggttgattcgtttattccacttacaatatacctcgtattaaatcctttatatcaatatcaataccaacgccatatataagaagattcttttcaaattaggcagccatgattcttcttcatcttcatcttcttctctataactatgtcattactgatgtcacatactcgtaattgttacatgacgcttggctacctaaagtagtctacacgaatctgtaacaagatcttccaaccttatccttcgtatactgtccctacttttaggtgtattgtcttacataattgataattatcttaggactttatcatattgactttgaagagtacatgatcttgcagtaaggtaagactttactgacacacaaaaaagtgccacgttgataaatttatattatgatgattattttttctccattctgaaataatatatttctttgtgtctctaattataagatattattttatttatgagatatagttaacaaatttttatttttattataagatttaattttatttctcttgtgtatttcttattttttttactaaaatatcctggattgtctctttctctttcctatagagatttgagaaagattaatcgatttccaataaagttaaagataaatttgaaaaaaatattataattatagacaaacttaatattaataactaaattaattaaactttttaataaacataaattagacaattatttctcatagtcaaagagatagagggagtagtattttgtttttgtttttgcagttttgcatttaagaatccttggcttggtgcttgaattagtacacagccacaattttggacttctaattttctatctattaaattgcatttaatagtattgatggacttcaactacaaaattatgctactttattgcgtccctttcccgctttctaaagggtgatgtgatgaaacggatcctttgctttgcaaccaactctctctagctcaacctccatcaaatcacagtagaatattacatctaatgctgcacattaattggtcccaattggtccatgttaatggaaattggtcaattgtttttggtatattggtcaatactgacaaattttaatgtcgattgactaattcacaaaacattggtcaatcttccattaacatgcaccaatcttacgattaattgattagtcgtaaaacaagttaaccaatcgctagcctcttaaatgcaatgtatggttgtactagatagtagtaatttgaatcgggaaagtttattagagaagattcaaatttgtaatgtgacattttaacaagtttgttgagtatttaaaacattttattactagtaattgcttctaattatttttaaaaaatattagatgatttgtatttttaatataacaaagatttttataaaacattttctatttttactttcagaatcatagttctaaacgcattcatggggcttcttcttcctttttttttttaagtaaaagaagaagaaaaatagtaaccaccaaaaatttatgacgtatggctgacaagaaattcatgtcatcctatattacgatttatgacgtgaacaatcagggtgtgcagcatgttggtgttgaattgaaacaaacagaaaagaacaaagtgaaaccagtttagttcaaattccaactcaacttccagaattggatagcatctaaagaaattggttttgcaacactcgaaaggaacaatacaaacacagcagaacgtactttaagaagataaagatacatttatgcatgtgggtgtgattgctcgtgaaagggttgaagccaaacgcgtcaagtttgtgtttaattaaaaactgctcttattgttgcaattataatgacgcatatctgcatctataaaaaatggggagaagaaagattattgatggtattatactaattaattttatcattgagggcctacatcaattcacatgtgattgtttcaatttaattaattcagatttgagtttaaggaaattttttgttattcataattattgtaactcgaattgtttacggtgaaagataaatatagtcaataaaaaaaatactaattaatgcctaatttccatccctaaaaatgaaaaaaaaaaaaaaaaaaaaaaaccgtgtgggggcaatgttatcaaccaccataccattaccgacacgcttcattgttttttctttttcaattacacgcgccaaaacaagagacgtcaacaaacgaccaaactaaataaaaatcttcatgtcgatgggaaaaaatcacttttcttcctaaaattaagattaaaatgtaagaaaccgctatgtaaatttctggaaaatggtttaaaatactcattttaactcatcaaagtatgcatgtattgactccttacatgatttttcttctccttcacacgtcagtctattttacagatacgatttgttaagtttaaaagttaagttattgacagttaaatcacgtttttttatcagatgacgtataactgaaatcgttgcttgcatctaatgtttacgtgtcatgcacgtgcgtctgtattcggaacagtggaatccaaataaaacatagaggtttcagacttgttattaggaattaatgaatgcttatcagtttatgaataatctgtcaaaaagattagttaattatttttaatgaagtttcttttcttaatctgtatttctttattcataagacttgattctcaaactcaagactttgtttaaaatttttgaatctaattcagttctaaccaattacatattttaaaaaatataaatatttaacattattaatattatttttttcattttagtaaaacatttaaattttattttgtaaccaacgattttaagatgcgttaaaaatattctttattttttatgttaaaagagcaagtaaaaaattatgttttgaaaaaaatgaagaaataaaatggaatgcttaactgcttaagaggtgattaacagaaataacacgaagttaactttataagattattgacaacgagtaaaggacaaatttgggagataaacatgattgaatccgcttagtggtaattttgtggggggcgagaacaagacttattcattgcttaagtaagcgttcctataaaatatagtactcaacaaccttgtatttgttctttgttgaataataaaaccacaaaaacaaaagcccacatgcatgccaattcctcgttgcatcagttctctattgttttggcttcaaagttcagatcatgctttccttttcatttaaggtgagagtctctgaaaatattgtgctgatcttgttttctacttttcttgttttgtatgaggatgttgtgggagggaagtggttttacttttttaccatatagattatagaagtgttggtgctgctcatgttgaagttgaaggagatgctgcatcttgttttatttatcagagaagaaaaaaagttacttttatggaagttattgagcttgtaaaaatgggttgctgattaacttttaacaatggtatgtttaaccgggagcaattacttccaaggttgatccctttctggtttatagtaatgatttttcactttttttgtcttgcttttcagtttaggtttgttgaatcaacagggtgattgatcagaatttctgtgtctcagtgtgtttgaactttgaatgaatttgtatttgaatgcttattttttatttttagtttataattggaagtccctattcacctttctatgtaattgagttgaagtttagagcatgtttaaagaagtttgagttcaagaaaatattaatggatcttatgagtattcctttaaggaattgaaaatcatgaatagcatgtgggaggcatttctgaacgatcctattttttttttacttttttaatgaacaaataaagggaccaaaaaagcaaaaaaaataaaaagaaaaaaaagaggggtctccctttaagtagcagcaagtgctccaaaattcattatctagttatatttatcaagtcaatctccatttcttgattgcatcaaatttgaaagcacaaacaaaaacaataacatgtggaaagtgaaaagctaaagaagagactgattataaaaagattcaaataaaatgataaaattgctgttttgttcggatgttaagaactatattctgttcatgtggattatgaaaatcagactctctttggcgtgctgctagttggaatagcatataataaatctggaaaatataatatgttgtatagtttgtttttctagttttaaaatgcctgcttatgccttcaataaataatccaactctgttcatattggtttctagcctttatttgagtaatatattccatatttcttaactcctgacatcaaagaataccaattttagacaatagcctcaatactacctgcttcttattccatcaggactgagactgcctttttgttttatatggttatagcttctattattttgctatctatgtttgttgcttaaactgtagtgttaccctttctgcagaatatcttagattttgagaacactgctcatgtccagctggaattggagtaaaatgtggacaacgatcacagaccataaatagaagttcctgttgtttgttgttcaaaaaaatagagaaatcagaaaattcaggagtgtttataccagaaaaacattttggtgttgttttcatatattcaaagtaccagttacttatcaaatgcaaatgtctcagaaacataaaatgtcctatgactctagcaggttcggcattgagcctgcgcaaaatctggggtcatgttgcttcctgcaaagtgggaacctagactactactcatcctctgataacggtagccatgcaacctacccttctgtttgtactttcgaacaatattgcaccctggaatcttctacaaacaacaatttcccttccctaaattctccatctactgtcagtttctcacctaacaatagcccagtctcaaagctgcagtcaaaatcaaatgtgttgagttcccagaattcgcttgaaattgttaatgattcgctagaaaacaaatcttgcttgacacttaacgatgatgagctgaggcacaagataagagagcttgaaagtgctatgttgggacatgatacagatattctggatacttatgataccataattccagaagaatctgattcgtttttgaaagaggcagaaaggtggaagagaatgatggaaatgatatctagaggggatttaaaagagatgctttgtacatgtgcaaaagcagtggcaggaaatgatatggagacaactgaatggttgatgtcagagttgcgtaaaatggtctccgtctcaggcaatccaatccaacgattgggagcatacatgttggaggctcttgttgcaaggctggcctcttcaggaagcacaatctacaaagtcttgaaatgtaaagagcctactggtagtgaactcctttcacacatgcatctactttatgaaatctgtccatatctcaaatttggttacatgtcagcaaatggagctattgctgaagccatgaaggaggaaagtgaagtccacattattgattttcagattaaccagggaattcagtgggtaagcctaatccaagctgttgctggcagacctggagcaccccccaagattagaataacaggttttgatgactccacttcagcttatgccagggaaggaggccttgaaattgttggagcaaggttatcaacgcttgctaaatcatataatgtaccctttgagttccatgctatacgagctgctcccactgaggttgaactcaaagaccttgcacttcaacctggtgaagccattgctgtgaactttgccatgatgttgcaccatgttccagatgaatgtgtggatagtcggaaccatcgtgaccggttggtgagattggcaaagtgcttgtctcctaagattgtgacactagttgagcaagaatcacataccaacaacctcccattcttcccccgttttgttgagacaatgaactactacttggctatttttgaatcaattgatgttgctctgccgagggagcacaaagaaaggattaatgtcgagcagcattgtttagctcgagaagttgtcaacttaatagcatgtgaaggggcagaaagagtggaacgtcacgagcttctgaagaagtggagatcacgtttcactatggccggattcacaccatatccgttgaactcctttattacttgttcaataaaaaatcttcagcaaagctaccaaggacattacactctagaagagagagatggggctctatgtcttggttggatgaatcaagttcttattaccacttgtgcttggaggtgatgatccaatgacaactggttcatttttgttatttcagacttttagttagtttatgtatcatcctattcttctttcgcggaattcatagtcaagttactctatagtttgttaaaataacacacttgatttatgttaataatgccagaaccagcaagctcgatctcatcaaagtagacaaaagaaaaaatggcaagcagcactatgtattctatattttgctatgacacgccttacaaagataaaagaataatgacaatttacacctacaaaacatgttagctgaaaattattacaaaacaaggaagaatagaactgggattttttactacaaatttttctaaggtaaactgcatttcttctaacccagttgagtgagacccttcatattcaccatcaacttcatttactgcagttccagcaattatcctgcaaattattgcagcttttttcacattatgtactctggcagtggcagttgttctgtttctcaactctttgtcacttgtattcaagtgaatctcggcatatcgtgtgttgaaattaaactgaattatttgacaaagataacaagatggatctttacacagatcatgaagtttcttatcagatttttcttgcaaacatctcattgtagtaccatagaaccgcaacagttcgttcccatcaactgtgctccttggattccttggattttgctcagaggccaccttcttgacatattctctatacttctcaaacctttctaggacttcttctgagtaactcaccctgaggactgttctaaccttcttcagtggctttgatttgttaaaccaagctttttgaaagatcatctccacaatttttcttgatgggtctccaacactaagctctgccataattttataatgacattaacaagttagtagaacaaaacatatagatagtgaaagaaaggataaaggaagtaagaaagtataaaccaattgctctagctagtttcttcttataagcccgttacattacaaggacttctgaaaaatcataattcttatatttcaaacttctttatcatgacacaccgagttacactgagttttgaagacaaaagcatgatgtgttcatgcaaataggagcagcatgcaacttagtaacttaccatgaagccttcccagtgtgttgcttggtcttgaaaccactaggctagttggagtttccattagaggtctattatatccattcattttctccttttctgcaacatagccacttcctttgccgcattttgtttgctgcttgattacatcgttgagcttgtttccacatttgacattatccttcaaggagacccatatggcatgcatctcttttttcgctcctcttcctccctgtgtggattgaaatatatgagcacaaaaggaatggcttcttgtgaacaagtttgaccttgttgtctcagtaacatgcacaaaattgagggacaaaaaacaaagagtaaatttttgttcactaaactcattttcaattttatacatatagggaaaaaattagtttatttattaaaggtataattgtttttatttcttgctgtctgttgaccaaattgaaatttatgtatatggataaaagattatattttgtttttatgcataattgttttcaatttagtttttatattttacaatgaccgtgtgttaattttactgcattgtaacggcaacaaagaaaataacattaaaagaaattaaaacctcttttggtacaagttttgaattaaaatgcatgtagcattaggacaaaaatatatttcaaccttttctttttccttctgtccgtataggacacagatgatggatctgttttaaaaatgagtgagaaacgtctgctctggaatgcttgagaaaggcaagactacggtggactctccttagtcatttattgttcttttgtcagttttaggcaagcagttctttgatttttagttacaatgtccatatcatatgcctagctaatcaaattttccaaaagcaagattaacttcaccagttcaatcatgaaatatgttcctaacatataattttttgggcttaatcttacgcttgagttatatcattcatacaacactttttacaatatcaattttctctttatttctcttcaccgcagtatttatcttgcatttttcttctattcctacctctatctgttgtataaaaaaattacaaactatttgtacaaatatatataatttctcttttcatttatgaaaaagaaaaagtgatatgctcaagtctaaagacaaaatagaataacatctgtttgcatattggttctgaaaagtcgcttcacatattaaagacacaatcatacagaaacatggttgtggcttttttctttggtataaagagtcatgtcactagcattgctttttccatttatatgataaataataaagcaaacaagagatcaaactttcttttatctctaatttggtgtttatttctttaaaaacaagaaccattcccgttagcataaaaaaatcataatgggttcaagctagatgatgatgatatagtaaggatacagaattgtgctcatggtaaggatcagcccataatccatacatcttgattccataaataggacacaacgtggctgcatgattcttcagtcatggttaagctaagacaaatatatgaatttaagaaagttgtactttacttgcactgcaattaaagaccaacgtgaacatgtcagaattgttcaaagataaagccaagagaatccaatcgtcataaaggatttactcaatcaatattccaagtatggcagtatgtaaatcccaatgccgattgactaatacaagaaattcatcctatatctaagcaaatgtcgtgccaaaatgcaagatgtatatttattgcaaaaatagtgttaaattcattttgctcttccaccaagctagcacgttcagttataacataattattcaattggctccatcacctttcatttgtgtttctctttctagcaaaattcttgaatgcactccaaagtccaaatactactactacgctaaactaatcacaccttgagaagtggcaatgaaatatgacagtggctaaattaatgttattgcaatgtactaggaacatgcaaagaaaaaaaaccccatttttttcttctattcagttttctagaaacaacaagtgcagcacatttgccaatgctgcggtccccctccctaaattacagggtgaaagggaccgtgtccttttgtatgctgaaaccaaaggattgaattgttaatgtctgtgaggacaaggtatatgtacgtataagattataacatccaccgagtttttcgtatgtgaatagagcatagacacatttatctatattcacatccctctcaatcatattattaaaataaaaaataaaaaaatcgtgttaggccatcttgatatgcaatggtaacatcaaatcttctcattaagcaccgcatcttattaagacaatcattgatcacaggtcttaacaaacatcggatacttatttaagcatgtgcttgtttctgtgtggggtcaagatggtaaaataagtatttacaataaaagaagataaatgttaatcagtactatgaggatattgattaaggaacttaaagtaaaaatatttttattgagagataaaaaattatgttattcatgatttttttttactctcttctataatttatacaataaatatttcttccttttaattctttaatcaataccctaagaatactaattaacaagacccacacaaaaggaatgttaatgttgatgaaatgtaaggagcacgaggttacatcatatgtgagacctatttagttaaataaatgatgatagtgaaatttcatttaaaatgtgtaaaaagtagaaaatgaggcgtttaggatgaaaatggccttagagagtccaatctacacaaaacagtgagaatatccaacatgtacaaattcatgatatcatttattcatttagtgcacggtgcacttcaattttcaccatgacaaaacaggtcatcaatcacgggttatgtacgacttgtaaccagtgcagtggggactaaggttttgtggaggtaactttgatatcagcttcatatttatacagaagaatttggatataattataatttataattatacaattacaaacggcaattagatttaaaagtcaagatggagctgctaccaactctactaaacagaagcgctatggaatagtgatataaacataaaagaactatctgcattttcttacagaaaatgagatgttacacatttgaagctatacccgccaaaaataagaaaaaagaaagcaaattgttactcatagttttttatttaatatctgttgtgtaatcaacttcatggacccattagtattcttcccatgctctgtgggtatggatatgaggaacggtttaaagatggaccatcactcctattgtctctagaaacatagggatttgagctgttatttagaacaccaaagtatactggagccgaggtagtatgaacaaacttgaagttggaactgctagtatgagtttgtgtgtccccaaactctgaatgcagcattttcccttgcccatttgacctatgttcagcagctgagctaattcccattccaaggtcaaggctaatggtatcactttcttctaacttagttcttgtctgtccacctgctgcagctgctggtactgccatgtcatggctgctattctttgcagctggtacatcatgattgtgtttaccctcatatgtggttatcactgcttttggatcatgagatgccctctccacatgttttctgacagggcaaccagcatttgtgcatttgtaatagctcctgaataagaagcatagtaagatacaagattaacaaaaaatatgtagttgagtagcatattttagcactgcagcgagttagtatcataagcatggatcattaacatgaaacaagcctcattcatcaaggtcgaagcacacatttgattttaattccaagctttcaagcatttcctgaagtagcgacacactaatataactggaatcatgagaagtaaccttttgagtctgtaattatggcatccacagtaatgattgtcaccacgaaatagaaagcgttagtacatacatttcctaggtgaatatcgccctatttataaataattgttcacaagtgcccaatgacataataaaatgacatcaataagcaggcttagttgtaacattgggatcggctacactagtcattcatgaaaaccagcaggatggtaatcctactttcctaccatcttcataactgagtataaaaattgcaatgatgcctgaatatcttcttgcccttcctcttcaccccaccctaagttttcttataacttcgtattggcttgcaaaattaatattcactcctttcctttggaagcaacatatattccacaatactttcctatatctaataatctactgccactttaatttgccactgtttctttgcaaacttttagaaatcatgcttttaatttccaacttgtatcttaattactaggtatttagtcactctagttcctttttaagatcctccatccccaccagttctcatcaaccttcacccatatgtccatctcagtatcccttaccaaaacaaatctataaagttattccttgtatttcttaattaaacccacaaaagttggtgcttaccaaaaattccctccattttttgcaaatatatatatccttcatgtctgtatatctgaatatactctaatgtaagatacacactgttttttatggaccatgttggctacaaagctgcaacaggggcctcaaagcctcagactatactaaaacccatgataataaaagaaacagattgcaaagcaaaatggttgataagtgaatatatataggcttcaataaattattatatcaagttgattcctcactttaactgttgtctagacatcaagtacaacagaaaaaacttgacattttacaatattaataaaaaagttcatttgacaaagcacattcattaaattggaatttataaattaatttctattcttagtttcatcaacgtgaggacataccttgggttaggattgcctctcacaaccttttggccatacttacgccagcggtacccatcatccaatatgtcaacctcactcaaagtttgtacaacaacccgtggttccctaataggcttaactacaggagtgatgtcaacatttccaagttccatttttctgctcaaaaaaaaaaaaaaaaaaaaaagaaactcagcagcagcaagtgagcacacatgctggagaaaatccagagcttcaaccaaattgtcataccttcgctttgagaagggatcgtcattatcaacctcttcaatagttctgtttgacgcaaacccggcaccctctaaaccatcataatttgttgctacaggtgatgactctggagtactgttgggctcagcagcatgagacacctgaccatacatagtggatgctttgtctacaattcaagaattagaagaaaagaaagccagttattttgtttgcaataagtaataataaaatggaagctaagatagatggctggtattaccatctcggccagccatagaagccttatcagatctctctccttgaatagacataacagtaccagtagagtatcggcagcttggttgaggtttaggatgatcatgtgttcccttgtaaactatctctgtgatttgaccatcatgagagcgctcaaaaagttttttcacttcacagttgggatgtgtacatttgtaataactgcgaggaaattcacttcctttaacaagcttttgcccatattttcgccaattgtatccatcatcagatgttttctcagctgcaactgaaagtccactgcctctaacctcaacatgtgatgcttgaagcccagtagctgtgttgcctttgtggttaatgtcatccaaatcaacatcaacaggatcactagcactagaactaaccttttgtacaggtgatgataggcttaattcattagaaggaactgctatctcactttcaactatgggtgaggaagcaaatgattgagtttttcctggaccttctacttgagtagattgtttacttacatggttgttgaagtctgcaggaaccttaaaacgagtgaatagcattggataagtgctaggcaattagtaatattcaaaacaatattaattagaacatgaaacatgacaacgcaatttgtttccatttaacactttaaccccccaaaaaatatctatttaaaggattataaattataaaactacttaaatgaaacatgactttcggaattgattttgtctaatgcgacaaagtgatgagtaccaacaatcttgacaactttcaaatctgattaattattccatcttgtttagttagtatccagatttaaaccaagtaaagtcacgggagaaagggaaacaaaatccaagccccttcatccatgtgatttgaaagtaatattaatcaaagtgttgccaacatcgattttaattaccatattcgatctattcagtggtttgaattcaaagaaacttgattttctggcatcaacggtattggtattgaagcaggcagaggttactggaaatgtagcagaggaagcagaagccatagaaccatgtactgttggttggagcttacggaaggaccctgtagttggtgaaacctccacctgcaatgcatggacacaaataatatttaaactataatattctttgagcaactgttgttgagtcaaatgaaaaattataaattcaaatgcacaaaaagatactggaaaaaataaattctcaaaaaaacaataaaaagaggggggagggggggaagccaaaacaagcaagttcctgaatacctgcaaaccctaaggcctcaaacagcaatcaatcaacctatgatatcagtaataacagcggaaaaagagtatatatatatatatatataatcttatgaataagccaactaattgaacagttttatcagccagtgatgtaagcaacccattataactgagcgtaagcaaagttctccattttctcctgctgatgatattgcatgttgtttatttggagtcagtttgacaaagatagcattgtacattataatatgcaaaagttagttatataaacaatcaatcataacaaagaaaagacactctcacatgaatgtagcacagaattctactcaaattaggaccatccagacgattaacgtctagaaacaagtcccacaaaatctagacccacaatctttctggcattccttatactattctcacagcacaaataacttaaatcaatccactaatcgttgcaatgcattgattcgtttgttccacatatataaatagtaaaggaaaagaagacgacttttcattgcactctgctgcaccgttgaaacaaaaacaaacaaaaagggcaagcaccaacaaaaaagaagattcattatgtgaaaaaacaacactgacactaaaataaataaaatgagaatgtcgagcgatcctaagctaaagttatattccactaaacagaacaccgtatttatttgagcataaagcagccaatacataatcctataagagcaaaagcatcagaacctaacggacccatacacaaatgaactagtaagtgaaggatcaaaatcaaacaagtgaagagccaactctaaagaaacaatgtgccacgagactaaaccagcatataagaatttagaatttcacaaaacaaaaaacagcatcttcagctcattgctcatcagcattcaaatcaagtcattttaagttatcaaattattccaccaaaaaaaaaaaaagatttgacaccaacccagataagccctattgagtagctgagaaaccccaagaaaatcgtagtgaaaagaacaaaactttgatacgccactcacaataagtgacctttaccttacatgggtcaagtaaaaataaaaaacagcaaacaaaacctttgaccaaaatgaactcaaaaacaacaacattcccccaatgaattcactcaagcatttacctttccttcttctaatccatttcctctcagaaaacacaaacccctttgaaaaatgaaaattctccctcataacacaagccattttatttccatttttcaccgaaaccaaaaagatttcaaatgagcacactcacactcaccttcatgttggaaagaagaaccggggattccagaaacgacgtcggactgagccccggaggaatcgtgatgcacggtgacctcgagatcggaagcttcgccggcgacaacagcttgtacctcgccatcgaattctgacccgacccgtttcgattcggatcctcggatgccccagtattttggagcaccgaactggagcggggttcgccggagttggtggcggcgtccattgtgggcggtggcgttgcggagagtcaaaggagaagtagggagggaaggaagggcaaaagggtcatttcaatgatgcattttggtgtgtgttgtgtcagagatgtttgggagagcagagcaggactctcagttgacttgcaacgttggagggatctctttctcacacaactcattcattcatctgtgactctctcttctctgtcattttaaaccctttctaacatttttttttttgttacttcttagtaactaaactcacaccataaaaaaaagtcatcatgatagtaataattgatgttgaatttaaggagttttcatggttggatcggattcattcagattttgaaaatatttttggttctatgtaaaggtaatctttttgacaaatttatttttaaaaaatgaaaatttaaattttgacaaatttatttttaaaaaatgaaaatttaaattttagttcttaagagtgaaaaaatatgataaatacattgattggttaacttttatctattatagttaataaaagagcgtatatgatacgaacaaaaacgtcacaaaaatgattgtttaatatgactattaaatagattggaccaaaatgtcaataaatttttcttagactaatttgttagatcccaaatttcgtttcatttaaggaaaaatataatttaatcttcaattccctcattttttatcgttgcaagcataacattataataaatacttaaaaaaatagaaaaacaaacataataataagcataatattgattaatagtcatgatctatatattactcgaaaatttctaatgtgtcaccttatccaaaatgaaatgattggtacactaacaatttttttgtattgttacaatattttgggtaaggtactgtcacattaaaaatttcatcacaacagacaaattatacttattaatcaatattatgtttattattatgtttgttctaacttatatttgcttccctatttttttaagtgtttattataatgtttattctcgcaatgataaaaaaaaggaggaaaatgaatattaaattatattatacctttaaatgaaatgaaatttgggatcataaattagttcaatgaaaaattattgacattttggtccaatgaaaatttactgaaattttggtccaatctattcaacattcatgttagtaatctttttacgtgacattttatgtctatctatacctatatcacgtaagctctttcattaacggtaacaaatgaaagttaacatatagataaatttgttatacttttttaactttcatggactaaaatttgaatttcatctttcaaggacgaatttgtcagcgctgtatacattcaggaattaaaataactatttagccttaaattaatcctattaaaagtgagtttgtttaaattttaaaaaataactttaaaataaatatttttttatataagtgtttctttaaagaagtagataagatttattttttaaaataagcaaaaaaatatttttaaaaaactaaaacagtgtagacaaacacattaaaaaaacaaaaaagttgtttcttttattaaataaatattcattccaacaaaataagtttaaacaaattggtcctaagattataggagtatattggtttgattcatgtcatgataaaaaaaattattatatttttaactttttgtttttatttattgtttattttatataatttttcaatttttttatcattatataaattttcaatattatattaatatgataatataagatagaaattttctttcttttaataactagtttttttatcaaaaatatcaagaagatttttttttaacaaactttgttattagttgaattttattagaaatcataatattataggagtcttattttttatttaatgaactttactattatgattttcaataaaaatttataaataagataatactattatataattggaaatgaattagagagtgtatttgtaacattccttcttcttttttacttcatttagtatttagtttcttatagttattatattaaatatttcattaatttatttatccaaatatgataaaaaaatcataaaataaatataatcaaattataaggccctcagtaacactagataaaataataagaaagtcaaaataaataaaaaaggaaagaaaaacaaaagtagaataaaaatgaaatactaaaatctaaaatcaattagtttcaaaagttaaagaaagaaagttgataagacgtaggattagtttggattaaaaaaaaatggaaacaaaaccaatcataattgattttgcttatatttaaaatgaaaggaactaattgatcaacaaattcaaactaattatattagtttggtttggatttttagatttttcaagtcaagatgatttcataatacccatattgaattgtttgtagcttaatacacatgcatggatcattattattcaaaaattattattaatataagagtaaataagatatacatcaataatataaaaaaaatcatattatcattcgattataatcttgtaagtgtaaaaagttattattttacaataatcaacttaaaaatcatattaacaataatttcttattaattgataatataaaaaaatttacattaatggtacatacaaattaaactcttaaaataattattataaaaattaatacatgtaagtaatttgttgataatataaaaaaaaatacagtatatattatttattctttgtttggaaaaaattaaggcgtgaacggatgggatggagagagaaaataatcggttgtgtagatttaacttttagactttttaaagctgataggtggatgattttgtcaatgaatgattcactattggacaaagattttgtaacaaaatgattattttactattcgttaaaagaattattattttttgtgtttgatgtgtgttttggctaggtaagagttgaaagtgaaaagtggtgtgccaagtaccaactctatgttactcttcaccatacacaatcaatatgagtgattggtgcaaaactgcggttccctttccacaagttgaaagccaaagccaaaccagaattggttcagcaaagggttagattcaaataatttaatctcatgaataggagagtcaggctcaagcaatgacctcagtgtgtagttttgtctatgttatttgaactttgatcacatgattcaattcaaggaatgctctgtcggcaattcccatggggaaaattagcaagtggatgtagcgaagagaactggattaaaccataattagttcacagaatcatgttgtgtttgaggtttttggacaatactacctggtttagggcatctaaatgtggcaattgttgacctgaccaattaattccatttgggtttgctgattttaaaaaaaaatccatttgggtatttttcagtcacaacaataaatgagaatgttgtcaaattttcatggatatgctgtaaagatctaagaaagaataagttaacatgttggcctcacactattaaatatcttctttactaatctcataccattttactaaaaggggttaaaaagaagttaaggctcaatttttggtttactactataatgtatagagtattattaatgaaatatggtctagaaaagcacaagagatagaaacatttcattatagtttgttttcttttctccattcggtgtgtgtttttactttttacctgtgtggagacagataagaaaaggaagggtgtacttagcctataattaggtgaagagataggaaaacaacgacaaatctaagcatttaacggcttgagatgcagttaaagcaaaggtctcactggttttctaattccttacaatttttttatagagtaatatatttcctccctaatgaattttactatattaaatgttaaagcatgccacattcaattcaattgcatatcagagcatgctatccaaaaataaaatcacctaccttatctatctctctcaacattttttcttatttgctgacaaaatttcccagataaaactaaagtatgaatcccttatttataacgtagacagtagaaacagttaagagttgttaatttcattggcattcctctcaccatcttaccgaccatctatttatccaataattttttgccactttacaaactttggaaatggctgagtgcatttgctttctcgaatttatttaatgaatgaaatttgaaaactgtcgcaaaaataaaattatgtatagaaagagagattttatcacattaagagttcgttaagtatcttcagaatttcatgtgaaaatcttagaggtgaattttggataaaatagtttaaaggataaagaaaactcattcttaagatttttaacaatgggataccaaactaatttttaaatttcagaatgtggagaagaaactctacttttttttaaaaggaaaggtactcaatcataaaaagcctgtttgttaatacttttattaatatgatcccttaagtatgctcagtgctcacagaggtttggatcttaataatgtgtacggaattttttttattagatgagatagagcctatttcaattatctctatattttaaaagggactaattttcaactattagttaaaaatactcttaataacagtatctcttactgtattcagtccatcattcttaattttttataaagaagtctatcattattgttaatgaaatgatatgattctgcttttggtcaatatatatatataaaggagcattgaataaaattttattaaaccccaataatattaaattttttcttatttttaataaattgcatattttattgttgattcccttaaaatttaatgtatgaaaagttcctattgatatcattcaaaaccgaaggtgaataataaaatattgatgaatcatatattaaaaattaccaaaaactgaatagatacccatcttacgattgataaattgcttctagttgttttgtcttgtattgacaaataaattacctctatttgttttgaattttcttatcttttcggcaatgagaataataaaaacaagaacgtgtataacgaggtaggaaaaacttcctcacaaaaatagaggattacttaaattaaaaatccagagaaaattcatttcatgaaataataacgttgaacagctaaaacaacttatacagaaaactatgtatttataattttctagtattcaacgcttccaatttactaaaacatgttgtctaaatttttttactaaaacataagaatgaattaagtttatttaatatttctgcatatattctataattaagttttctttgacaaatatttaaatcaatcaaattccacttttcaatctgtgctcactaatatgaaaatcttgactccgcatagtgtatttcccactaatgttaaatcttgtaaaactactcatgtcccgttgataaaaaccataacacagacttcaataatatattcactaatattctttgccaaattcaaacttctatgcttaaagctagtcgtccagggtgagttacaccttgttagggatgcaaagtccatttcctctgaatgaaattctcactattcactaaccaaaaaagaagaaagctggccagtcatctacggcccattttcatggaacacactgagaatacgtctcaaccatcagtgtagtaaacatttccaaacatatagaaaacgaggtctcttacatgttacattaccaattagcaatgatctcaaaaggtgagaggaacaatctatacaacaccaaataataatacagacacatcttttcttaggtaatagatcacttcataggtagaacagtgtaaaaatcctctcatacacttacccttctttagtgttaactattctacggtaaaactcaagctaatgcacattgacagagctaatgacgtccaggaaacttaaagatcaaaatactgtacgtacagaaacatgtatcacaaaatcagctggtgctaaaattgttaagagaacctccctagtagtgtgtgtataatcgaagtgtcaaaactcattttctcaagctaatcttattccaccaacattatgttggttcgaatgtaattgagtttctttaagtaaaatcttgaattttgaacttgagaatgaaaatgaacataattggaaaggaatatcttttattaaagatggtcgtcaatttttttataaaaattaattattaacaaagttgatagatactttacacttacaacatagtaaataaaaaaatgttaatcttaatattgttttttatcattagctaatcttaatctcaccagcctcaatgtgattatttctttatattctttttttttttggaaaaaaaaaatagagcgggaaaatggttgctgaaatccagattcaggataggcccacgcagggcactcacaaataacccaccataaggagacctgggattcaaacttaagccacgtgtttgtcatggacttagtgcgatcaagggagccaactcccgtaggcaaatttcttaattttctatgattgacagtactgaactttttacccacttcatgatttaaatgatgcaaaatctatagactaaaaaatctcagacagcccaaaagtttattttcctacaagggtttaacttcctacacccaacaaatttctaatacacccagcacttatttgtgaaataccataaatatccttcttgattactttaataaaacaaaagcattcaaaggtgatttgatttttctaatacacccagcacttatctgtgttttcgcggctcttctccttctccttcaaacctgcgattttgattctccggcgcattcaatggtgtgcggttcttgtctgtggctgtggacggagctggtggtggtcggcaaagctgttctggtttccggcgcgacgaggtaagtgacctttggctcggagtcgtttgagttttggatgcgtacagatctcgaatccgtaagctgtacagtatacggattacagatccgtattaaggaatgtgagccccgttgccttacggatcaccaatccgtagagtccttacggattgccaatccgtgggatcattacggattgccaatccgtgggagcctcacggattgccaatccgtaggagcctcacggattggcgatccgtaaggaccccacggattggcgatccgtaaggctcccacggattggcgatccgtaaggaccctacggattgccaatccgtgggagccttatggattgccaatccgtaggggtatttgcttaaatttttttaaaaaatgaatgaacttaactgctttaatgaattgctatgtgtttggtatggttgaatgattcgtaaagtatgttgtgtaatggtatggacttgttagattattttttatcctcgacatgtgtatggtttgatcgatggctagataatgtgtaatattatgagtaaaatgaactctttaaatgaattgttatgtgaaaagcttgttgtctaatggtatggacatgctacattggttttgatctcgacatgcatactatggtttgatccacatttgttacgttatttgaaatgtgatgagcaaattgaactgttttaataaattgaactgtgaaaaacatgttgtgtaatggtatggacatgctacattggttttgatcctcgacatgcatactatggtttgatccacatttgttaggttatttgaaatgtgatgaggaaattgaactattttaataaattgaactgtgaaaaccatgttgtgtaatggtatggacttgctacattggttttgatcgtcgacatgcttactatggtttgatccacatttgttaggttatttgaaatgtgatgaggaaattgaactgttttaataaattgaactgtgaaaaccatgttgtgtaatggtatggacttgctacattggttttgatcgtcgacatgcttactatggtttgatccacatgtgaagtacatgttgtctaatcgtatggagctggtagttggtttttaatctacttgttaggtttcgttatctgaaaggattatgcttatccaaatgggtatgtttgtaatgtaactacttggtttcaatgtcagattatggctaagacgataggattacggtgggctttggcaagagatgccagtgaagaagaacccgctgtacggcgaagaccgacagcatcagcacggagacaacgccagaggactggtgttgttgaggacgtgcctgctgaggtagacgctgacgatgttgaccatggtgcacctgttgaggctgaggtcgagggaagcatcgatgcctctgatgttgacggatttcccggtgggccccaggacacttcagtgttgagtcattacgatgaacatattgcacctaggatttggaggggggaggtatgattgtatttaaacatagttgaatttgataattattttcgcgttagggtatgtgtatgtaactaacaactaatacaggaactgccggagcttaagttggcatctcatgggaggaaggtgcataaatttggccggcctgcgcctgagattgaagggttggtggcaggtacaagattaagcccactgatcacctgttcggtagatacaggtgaccggggtttaatctcggcatttgtggagaggtggcataaggagactagcagtttccatttgccgatcggagagatgacgatcacgctggacgacgtcgcgtgtctatttcatctaccggtgatgggtgggctgcagacgtacgatgtgttggacgttgatgaggcgattgcgttactagtagatttgcttgaggttacccatgaccaggctgcagcagagacgaaacagtgccatggaccttatgttcgtctgtcatggttgcgggagttatatgatgagaggtgtcagcagatgcagtggacggtggcagccagagcttatttgctccacttggttggttgcacgatttttgctaacaagagtgccacacatattggtgtggtattcttggagccatttcgtgatctccaccagtctggcgggttcaattggggggcggctgcactccaacacatgtacgataacttgaactacgcctgtcagcatcatggtaaacatcttgctggttatattagtctgcttcaggtaaattttttttatataagttaaaatttgttatttgtttaatgtgaaagtgaatttcaactgcttatttgtgtttggttgtttttgttacttaagtgttgggtatacgagtactttccaagtgttggcagcatgattgcggataaggactatgtagagagccagccacgggcatgtcgctggaagccggggaaggcgttacctgtcagttcctatcggaggcgactagataggttgacgaccgacgctgtctgttggactccatacatcgatcatcgtccggtccgtccctttgaggtcatctgtctctactcaggttatatttgatggggtccttactgtgtcaggtaccttccagagagggtactcagacagtttggcttcattcagaccatccccattctcctgagcttgcccaccccgtcagatgaagaggtggatgacagctggcttcattacgcccaccatcttactatcacaggacccccttcccccggccagtgcgaggctgcatacatggactggttctaccggatatcacaccctttcatgtgcccgcctaagcctggggaagacagagcgcctcctcatgtgccagttaccacagatgatccaccatctactacggcagaccccacgggtgacattgcagctgatcagcctgacatgcctcgacatgcaatggtaacacaaatttgtaatttattctcgtattaaaaaatgtttaacctgtgttatgattataacgaccgcttacacagtttgtctaatttttattgcaggccgcattcgaaaccattgcagagaggttgcagaggcttatagatcttcgcatggtgacctctggcaccgatgtgtacgagactgttgccaactgtgttacattagcacgcagtgtctgcgatgatcggagagtgtatgttcgctcgagacgtcgtaggactggaccgcgtggagattgatttgttactttttttgtattgttgacaacatatgtattaacattattgtattgttgaaacatttcatttcatatatgtaaatgctttttaacattatccatctgcgacagtattttgtcatgcgaaataacagaatccagcagttaatacaattacataaccccctgccatttagttcacaacacatgaaaacattacgtaaagtcaaagcatgtcagaacccagatcaacataaactggtggcaatgttgtcaagcttgtatacttcttcagtcgactaatgtaactagatggccactcatttgcttgaggctgacaatgtcttgaccataataatgcaattggtggcataggacagccatctcgcaatgcaacctgaacacaaaccgttttattgttaatgtacacaagtcaaatgattagaaacacataaaacgacattagttgtacctgaacaaaatggtttccatatacatgaccgatacaaatgacgcgatgtcccgcaggatctctaggcggttggcttctaagcgggaaaaaagtcatactttgttgcttagaaagacaaacaagaactaggttataacgtgaagcaattacataacccatgtctgtaacatccatccatttatcctgtgttacctgcattttaacaaagtataagtgttatgcaccacaacaatatggtaatattgtcaatcacagacacaagtcacatttaccattgagaatccgtccacaagtagtgatctttttaagtcctcaaatctttgtaacccaccaaacaatataatatagtctgcagaccattcgttaagttccttaagcaaattgttacgaaccacaggccacccatcttcaccaaaacccagtagagccgcaataacccgatatccacaattaccatcggctttaacatcacatacaccaataatgtaatttctcatgcacggaaggaactgatccagcattggaatatcacccatcggtgaagcacctgaagatgttgaagcggactgtggtacagaggagcaactatcatgttgagaatgtaatgcgtcgacgtactcaaagtacgatggatctcgctttgttgatctttgatacttggtaaggtttttcttttgagccccttttgtcttcaccttttcaggaggaggacacattgatgtttgatcaggatacgcaatttctttcaatttagtcttaagagtaactttgccacacaagtcaagactttcaaatcgcttggatatcacttcccactcttctgtgatggtcacctccatctcatcaactgatgagtccgacatatgcaatctccgccaaaacatgtgtaccgtgcccagtggtatgctgctaacattatactttgctaactcacatgcacaaggcaaaccatgcgtacttcttaacacacatccacaacgacaactatctacacctacatgcttaactcggtctaactctgcggcaatttcatttaacgcatacctggaaaccatgcctacgagtcttttgtataacgtggttttaaacatatgtccaacaacatgtgtgcttgtctcaaaagaagccttaatctcattgtgttgtaacgtgatcatgttgttcatcgcatcctatacgttacacaaatctccaagactgtcctgcagtagtctctttaaggtccaatgggcagacttaaccctgtagtaaacggttaaaataacaccggttaactaaatgatgaccatgcagtataatgtaattgtaaactttctattgtaaagcatttacctgttcgtagtggtgtggccaaaatgcatcactttattagtccaggctgtgacaaatcgttctttgtgagggatcaaccacgtgtctttcacatattgaacaaatattggccatggtgcacaaacacattcaaacctcatcagacactcatcccattcattttcaaaagcacaatctaccagacttccccatgcttccatgacaaactcccatgaattgttttgtcccacgagcgttttacatttttccttgacattcttgtcaatgtggaaccgacacaacaagttcattgtgccagggaaaacatctttgatcgcattcatgagggctgtatctctgtctgtcacaatgacatcaggaaaaaattcagtcttcaaaaaaagccctctaaatcgttcaagagcccatacaagattgttcgtacgttcgccctccaaatatgcaaaggcagctgaaaaagtcatcccggtaggtgtcactccgactatgtcaaccaaagggagtctatacctatttgttttgtatgtactatcaattaggaaaaccaaatgatatgaatttatcaacttgactgcatccggatgtgcccaaaacatgtctcggataacattttcttccttcactctatgccagtggacatacatatcacgatgaagaagcttcattaaatgttgcatttcagtattgttgcctcttatagaagtgcggtatgcatatcttgcattgtacacttgtttcattgttgtataacttttaggattgcgatcttttaaagtgagcataatatttttgggtttaacccttgagtttgtcatatcaccaacaattaccttctcttcctcagttaaacgaccagcatatggatgtccagtgaatgacttagccaaacaatggttgtgtaacccgcagattaactttaccatccacccttcaccacctatgacgggtttccctcgcaacttaaaaggacacccgcattttctactgctagtggtcatgcgttctaaatctttgttgaatgctctatactttccactcctttcacaacctatcaaaataaatgtggtccttcccctcttaccagttgttgtgtcagacctcattatcacagctacaaaaccaatctcatgtgcaacactacgagcccattgcaatacctcgtcacgagaattaaacacctacaacatttcagaatacatgctcaatctcatgaaattatttatttactgacattcaatatgctactttatcacataaatacctttgaagtcttaaatgcatcagaacaatcaatcacagaattctcattctcaaatgcaaacggttcacctctattgtcttcacccatattattttcttccgccataatatcatcatgcatccaatcatcgttatccatcttaataaacaaacaaattcaaaacaaataatcattaacaaaaaatatggttatattcatttcacaactttgtgattaattcaaaacaaattttcctcataattcaaaagttaatggttattttaattcaaagaggaaaaatacaataattattaattccttttaacaaaaacaactcaaaataacaaaaaaaaaacccaaaatcaaaacaaacagaaaaaaaagccatacggattggcaatccgtaggagtcacacggattggcaatccgtaggagtcacacggattgccaatccgtgtgactcctacgaattgccaatccgtatggtttctgctacaatgattagttgcagaacgtacttccgacgacggcagcggccaatggaagctccaccaatgctaaccacgacctcccgaaccaaaccaaccacgcaagaggcaccaacacgcagccaacaaccaacagtgaagacgcgaagaagcagaaggcgcatggaagaagaaaatgaagaaaaaacctgctgggtgtatgttaaaaagcaacaagggtagtattgccattttttaaaaattgctgggtgtattagaaattagctgggtgtaggaagttaaacccttcctacaatgtgtgtcacataccttggattagcccaaggtgataggaacccaaacatattgttttgggctgcttcataaaaagagacttcaactaccatagaccaaagcatacataccatgattcaaccgaatatcactaccatgatgacatttaacatcaattcatccacatctacttatgatactcaactaaactgctagtaacacaaaggaaagaaaataaaccagagatgagaaactgatctgaataccagacctagttgaaaggtatttttcaacatgagaacaaagacagttcatacagggaagtaacaaaataacaaaacaaatatcttgtattttttcatctgtggggatgatgcctggtctcatggatgagaacaatcaatacaattctcctagactttatgttaaagcttacggaatggatggattaccctacgtttttggattaaaatcctcgaaaacaatggatgagaaaagcgagtttctatctacagtgagaggcaaccaaacaaaagttaaaatccagagaccagggagagttgttgtctgggatgtcataatactaaatactttcaatcccattattaaattttgataaggttaacccataatttcctttaaatatgatttctgtttttcttttactattatgaactaggacatgaaagaaaagaaatcaagcacacatgaaactgtagtgtagacacgtttaataagttattctcaagcaaaactgcacctgatacagtgacacaaatatggaagtttctatttgagatggttttacctttgaaacccaatctaagcctcaataccaaacaaagaaaataaaggtaggcatgaatgaagagcaagaacagaaaagtttaaggaataccgtgaataacctaaaaggaaacttgtagatgtaaaatcattcaagtaattaaaaattgtgaaactaatcattccctcacaatccttcattgctgaatctatggttcctttcctttaatcatggagatcaacaaagcaagctatgcttttaataactaaaagccagaagtgcaaagtcatagagaaactaataccaagccaccaacccaggagttcagttttcaaaagaaaacgaaatctcaatctactgaggataagatgtttggtaataatgttgctgaccataaccaccataagcagagccactatcataataaccagaaggcataagtggttctgatgaatttggaagagaacaaccttgaccaaggttgccactgggacccattgggacaccatcaggaccataaggcccagttgaagcgcctgcattaggcaagatggatattcagattgaagattactacactcaataaccttaattgccgatttcagtgcatggatttgtctcgccatgatctcactctgcaaaaacacccaaataaatacaggcagtgacaccatagaccaggtaaccaatcaagcggaggatacttacaagtgacttcccttcttcggaaagtcttttaacagtttctgagactcattcacgtgagctttcaaaatgggaaccggtggaatcttatgagcaagattgaactcaaaaacaaacttgacagccaaaatatgtttgctcctgtcaataactttctgcacaagacatgcgtaacacccaaaacaaaatttccctcacaaattaaaccaccaaaaagtgtaacactagaaatcaaataacagcagcatcaccatttcaaattacaaccttgcaccatttttgttattaaaaaaaattccaactccagaccacgcaacataaacactaggggcttaatgatgtttaagaccctgaaaaatggacatcattagtttttgtccgtgactttcaaaaccattagtttccgtccatgtgtttttttaaatatccaaactttaatcctctaaagctaaaattgcaagggactaaaatattatgatattaggggataaagtttggatatttggcaaaacatacggacgaaaaattatgattttaaaagtcgccaccctaaaaccaaagatccatttttgatggaatggaaacaccataaaccctaaacactactgtaacaacaacagttaagaaactacaagtacaacaaaacaaaaacacaaatactgtaacacaataccatctcctaccagctcaaataaagcaaaaaatcaaattcaattaagggattgcaacctggaactaaaaccaaagatggccctcacagacttaaaacaccattaaccaggggtgtaaatgaaccaaattattcatgaactattcgagtttgactcatcaattaatcgttcaaacttgtttgattaattaaaataaacaaactcgagcttgatattaagcttgaatatttaaatgagtcaagcccaaattttaaaagcttaatattgatattaagggctcgtgaatagctagtttatatatatatatatatatatatatatatatatatatatataagttttatttaatcttatactagtatttatttatgatagattgataattttcattaaaaatttatttacttttataatttttgagttaaattagaaaatataagataagattaaaaagcaaatgacgtttcaattgctttgagctttcccacttacttttcttttgcattgtaactcaaaattttgaagactcttcctttgccaaatcaagtttttcatcttcaaagcttttctcccaaattaaaattccaagattataaatgagtcaaaaaaaacataactgaatgcttctcatagtaaaaaaaaattctaccgaaatcgaaagtaaaaaaaaaaatgtttcaaaggattttttcagtttccacatacaaagaagcttttcgtggaaataaaaattattttctagaaacatgttgtagtaaaattccaaatccttttcattaaaaaatggataattgtaccaaataacaatattaatcactgtaaaaataaaaataaagcaatggaaaattaacatacttgaagttgattggtgtcttgcatgagaggggtccgtcatatttgaatagttgaatactagaatagaatgtgaaacaatgagtgaaggaatttgaagcacctgagattgaatttgaaagtgatgtagaagagtggtccactggcccggtagaaagtgaagtggaatttgaagcacctgaaattgcattgtaactcatttaacaagccaagcccaagattataaatgaatcaagctttagccattaatttttttcaatgatcaaacccaaaattcaagagctcaattcaactcgtctcatttacacccctaccattaaccctaaacactagtgtaacaattcataacaacagttaacaagctacaacaacaaaacaaaaataaagtcacgtcataatatcatttcttaccagctccaatccaaaattctgttttaattcatttcggataaatagtcaaattcgtcttcgaaaatatgatgtggtgacaaattaatacctaaaaaatgaaaaatgaaaaatttaaatttaattcctaaatgtgtaaaaagtaccaacaaattaatcatttcataagcgtgatgttatttgatgttatctcatgaaaaattagacttattgagcttgtttcgttccaagttaaacaaatcctattacagatataggatattagtattactagggttgactatataacctacatttgtactcatgtaataatttttcttatttgagtaaaatatacttttctctcttttctccccctgacccatgaattctaacaagcccttatcactccgatcgggatagacgggtccttgagctatttttttagtgaagggtgttaatgaaaatctttaagtaaaatagtctgtgaattgataatcaaatggagtcattacaaacatacgtctattagaatacgagacaaaaagaatcggaggggataaaataaaaaatgagaacatttgatcacggtaaaaaatcataaaaaaattataaaaattaaaaacgaatgttgatataattacaagataaaaaatatattcaaacctttggacaaaatctaagaagataatgtttttttttcttctctaattcaaaacttactttttttagtcacagtaccaaactcacaactcctactttaaccaagcacatttaagcaacgacctgcaaaaacaatagtaatagtatctgaattaaatatgtgttccagcttaggggtgttattggattaacttaaaaatggtttggatcaaatctaatttaattcaattaagatatgattataaatggattggattgtgagttttattttttattcgatccaatccaattcatatcatacattttatttattattatatgtaaattaattattaaatataaaatacattaatttttaactcataatttattaattattaaattaaaaaatccatatttttttctttttaagttattatttttatctctatcttgattttatttatattttcttatgttaatataaaactttatttatatctaaaataaaaatatcatattaacatatatttagtagttatatatttataaaattttagataaaaataaattattattctaaaaaaatatttttttacaaaatatatatatatatatatatatattcaaatatttagactcgattaatctttgaatagattgatttgaatcgaatttataaaaataattgttaaaactcaatttaatttgcaaaattttcatcagattatataatgaatttaatccaatcagattaaatcctatccgtaaacaccctatcgaaccataaaataagattagatacgctgttggttttttaaataaagaacaaagggcaaaaaatgcatggactgatgaaagcgtaagtgagagagaggaattggttttgaatttcaattttgaaggtatagtctatagtctatagtggaaggctgaatcaggaaggaacttatcctactagtgctgtctgtcaacgttactcacttcagaagcattatataatagaatgagccaaacaacaacgaaaacgcgttcacttcaaagttttattttaaaattaatattattaaaggaagggtacaaccaagacgcgttcaatacccattctattctatttctgctccctccatacttttccttactccactgcctattatttaaattacatagctcttagagtggaacaagtttaacgggtaataaccatttttaatcatcattgattttccactttcaattttacaatattaactataactattctttcccttaaataattcccaataaaaaggaaatgaactaacttgtaaagctttcatagaatgaaatacaattaatagcagttacttgcaaagaaggaagtcaagtgtcttgttttaacaaaatttaactaccttttaatttatttaattaaaattattttaactggactatactttatttaattaaattagttatgtttggtaaatattattttactaacttataatatttttgaaatgttttttgaatttgcgtttgaactcagtttttttaccttcaatattttaagaaacattttcatttatcactttttttaatgttatattattttttttaacaaaaaatagtttttaataccacattatttatttttattataacagaatttgactttcaaacaaaaagtaaatgcttaaaattaattaaaaaacaaaattctaattatctaaaaatatattttgtctactaaataaaaaattatataaatatactatttgatgtcagataatttgattatcaaatacagccattatattgtacaagatcctttaattcatataaatattgaatggctgattaaaaaaaaatcaatgataagtgaatagtcatgacatggacaacacaattcatgaacatactctttaattcattaactttcttgcaataatataattgtgtggtatgtatatataccttacgtgtttagattttaaagattctttttgttttttaaacagattttaaagattctgcatgtgcaaatattaaaaagactgtatgagataaatgtgaggtgcaatgatcttctatgaaaatggtcactttaaaaatgattgtgttcgcgcctaaaacacacactctttgcatcttcttcaaaccttataggctttatcgcccattataactctgcatattcatatccatgattactaaaatgaagttcgttgtatgcaaagattttgagctagctgcatttgaagatggattctactattctagttctagggtgaagtggcattaatttttatcattagatatataactaaaatattgggctgagattcaagaaaggaaactcacttaatcggttattttctaattacatttgaatgttttataacaattactttatttttctttatgtggtcaacttcctgccacccacagcccaccgccaccaccacctccttccagcactcacaatatgcaattcattccaaatttagtttccgtaaatgcgataagttattaaattcataaaattattttgtaattaattatattatttaagtatttatttgataataaattatattttaaaacattaatttgatattaaattataaaatttagatattaatttattattaaattatctaaagaattaatttctcacatttttatacatttaggagttaatttaaatttttatcttttaagattaatttgtcattctttcacattttcatagacaaaattaattatttatcaaaaaataataatatttttaaccaaaaacaattaaaagtttacccgttaatgaagttgcttttctctgacctctcgaccataatgtgaaaaaaacaacaaatagatcggtgttattattaaatttgtgaaaatattttattattaaatgataacaaagattaatttaataataaattttatttttaagttcactttaatattatattacaaaattaaagaatcaatttatcattaaattattcacgtaattaatctttcaaacattttattttaaaactaaatttaaatttacttttttaatgcctaatttattatgtctcataaccaaaataaaatattttaaaaataaaaagacctcagccattcaattttttaccactcacattggaagaagccgccgactttgaccaaagagaagaatgagaagaaaagtcacactttcctcccttcttcctttagctttcccgttgctgctgtgctgtgctgtgctgacaataaaaagggccacccctttctccctcttcttcattcttcgctcaatcgaggtcttctcgatttccttttctacaacacaacgctctcttctcttgcaaccaaaatacttgttccagtgtctactctactcaaaaaggtatgtctttctttccgtgcttttactgactcatacatatatatttttttttgttgggtgttcttgtttagatctttggttgttttgggtgggtctgaggaatatgcttcgtgggtctgcttctgggtagattaaagtttcaaactttggttttatattttggcagttgcatgttttcgccccgacccacctttcttccttttagttccttattaagtttattggaataccaagttgttgttgtcttggataggattagttatggatctaacctttgttggtaaaattggtattaacacgttttatggggacgttgcttagctttgtatctgtagggatttgaactagggtttggaaactctgtttctaaatttgaggttttatcgtttttctttattctgtgtgaataataaattataaattgaaaggcttattgagattacgttgtcttattctgcaggttttgggacatcatgtgcagtgattcgaaaagtaaactttcttccccaaccctagtcgtcatggagagtagtaacattcagaagcagaatctggatggtctctacaactcggttttgcttgaattgtctgcatctgatgattatgaggctttcaaaagagaggtggatgaaaagggcttagatgtgaacgaggcaggcttatggtatggtagaagaattgggtcaaagaagatgggatctgaaacgaggacccctctgatgattgcttctttgtttggaagcgctaaggtgctcaattatattcttcttgagaaaggaggaggtgttgatgtgaacagggtctgtggttctgatagggccactgctctccattgtgctgttgctggtggctccgaatcctcacttgagattgtcaagctcttgcttgatgctggggctgatgctgagtgccttgatgcgagtggcaacaagccggttaatctgattgctcctgcctttgattctttgtccaaatcgcgaaggaaggctatggagatgttcctcaggggtggtggggaaagagatgaactcatgaaccaggagatggagttacagatgttttctgttccagagaaaaaagaaggaagtgataataagaaagaataccctgttgatatatcactgcctgacatcaacaacggtgtatatggaacagatgagtttaggatgtacaacttcaaggtgaagccttgctcaagggcttactcccatgactggaccgagtgtccattcgttcatcccggggagaacgcgaggaggagagacccacggaaatacccttacagctgtgttccttgcccagagttccgcaaagggacctgccagaagggtgattcctgcgagtatgctcatggtgtttttgagtcctggctacatcccgcccaataccggacaaggctttgcaaggatgagacgggctgtgctagaaaagtctgcttctttgctcacaaacctgaagaactacgccctgtgtatgcttccactgggtcggctatgccatcaccaaaatcctattcagctagtggacttgacatgacagctatgagtccattggctcttagttccacatctttgccgatgccaagtgtttcaaccccacccatgtctcccttggcagtagcttcatctcccaagagtggaagcttgtggcagaacaaaataaaccttactccaccatcgttgcagctccctggtagccgactgaaggctgctttgagtgccagggatctggagatggagatggaactgctcggtctagaaagccctgctcgccaacaacagcagcagcaacaacaattgatcgaagaaattgccaggatctcttccccatcttttcggagccaggaattcaacaggattgttgatttgaatcctactaaccttgatgacctgttagcatctgctgacccttctgtattatctcaattacatggactttctgtgcaaccttcaacacccacacaaagtgggcttcagatgcgccaaaacatgaaccacctccgtgcgagttatccatccaacatcccttcctctcctctgaggaagccctcagcttttgggtttgactcatcagctgctgtggcaactgcaatgatgaattccaggtccgctgccttcgcaaaacgaagccaaagtttcattgaccgtggagctgcaacccaccatcttgggctgtcttcagcttccaacccttcttgcagggtctcctctaccctttcagattggagttcccctactgggaaactggattggggtgtaaacggagacaagctgaacaagctgaggaaatctacttcctttgggttcagaaacagtggggtaactgcatcccccatagcacagccagaatttggtgctgagccggatgtctcatgggttcattcattggttaaagatgttccctccgagaggtctgagatatttggtgctgagaaccaacaatatgatctcagtaaagagatgctttcaccatgggtggagcagctgtatatagagcaggagcagatggtagcatgagcaagggctgccatggcaatgcttcttggttattctgacaaagtttatttatttatttaattattttattcatttgaaatgcttctactatccaatattacaaaatatagttagggataggatgagatatgttgcaaagaacaaagttcaggttaatccagagatttgaacgggagttccaacttctagaagatcagggaagacttggagaaacgttgaacgaaggatgctgaatttttatattgtataatataaatttataacccccatttctctacggatggatgtattttctctagcaagtggaccccaaagtagttgtcattgattaagcagcacaattctttttttatataaaattgttatgccatttgatcaatgcttatccattactagaagtagtttcaagggaatttcttgtgtgtctgtttattgcctattctttcttatttaaatacttgattccttgtggtttaatggattcaaattcttcaaatataaatcgtgttcttatttagttttgattatattgagcttgtaggatctgtatcctcacggttttcccccctcaggccacacagagatctgtttttctcggcataatattcttcgtttgagattttttttttcctctttatgttcttgacggtttttttttaaagaggagttttaacacatttgtctctttcaatttctcccccttaaatacaaagagaggtcagccttttttgggtccagtaataacctgttctccccgccccccaaccagaacacaaataattaaaacatgatggcttctttcctgttgggagtttaaggaaaaaactagaagtaaacttacaaaatatgagctgacttgtattcttcctattttttttaaaaaaaatattctaaagaaactccagaagatcacttaatataaagaactttgaatgctgttttgttctttttttcccgaagggaaaaattcatagaaagcctcacaagtaaagagaataaaaaaagattgaaacacactgtaaaagatcaaacttacacacaatttcatgtcccgcaacttaatcaactgaggttactaaaggagagtattagatacttgataggtatggagttgagaatgagtttcaaatatttattgatttcttattttataataaatttttaaaggtccatcgatgaacagctgacaaaatgtttgaaaaaccattttcaatgttacatctaagggtaccaaaggaaaatagagtatgtcactttaattggttacagtagtactatcaaatattttagaaaaaacaggtcatggctaacccttcctttctggagcattagttggcacttgcaagttggaatgcaataggtaaaaaaagtatattcttaactgtaaaatttcttatgtatctcttaaattgcaataattttttcagccgttggttcaagaaaaaatttgtatattgtggaaatcaaacataagatttctatttaaataaatcgtttcctcacatttgaatacagctgagtcctacgcctttgtcaatcttgtggtttacatgtattccataggtgcaaaaaattgcaattatctgtacagataagatacaggttttataaaggtgtcgacgacggctcaataagaaaaggaaagagggttggaaaaaataaatggtgtgaaataagtctgcttcagatttattttaaaaaaattatgtataaaaagcactcccatttataaatataatacaagactttatttatgtatgccattatagatagatagattcaactttgaaatgaaggcaatgtcgggaaatgtagttatccagattagagggttatgtggcgaacagacggtccaatggtccttataggtagttgagtccttcagagaatgagttggtcttggtttagagtttgtttgttagttcatcaacccacgtgcttaaatttgtcaaggataatgtttagggcacattagcaaaataggcaaaaaaaaataaaaatgtatgaagtacattttgtataaatttgatatgatataaacgctgacatgatcggcataaagtacacacgttatgtataatcgttaaattttatgcaaatttgtgctgcaagatattaatataaaatcaagagatagtaaataattgaatatgctcctatcgtcacaatttgtgttatcttctaaactgaacttatttcaggaagtataatggcaaatgaacgaaaattgtataaataaaaacatgccgcacaattaaatttaaacttcaataacaaatgtgaagttaacttacataaatctagagatatgttatgatgattttctgcgttgtttctctatcacaaatttttttaatacaaaatcatagcatattagatctgcccatcagttaagttcataaaaattgtatcttcataattctctctcaagtgaaatggccatattttcatccaatttcatcaataaataactgttaacactctgatccgcattttccgctttaaagttcttagccatatatattaacaaagatagcatacgctccatatagcaaataagttgaattacaataatgggagaaatgaacaaactagagctgtctttccattcatttttgctttggagatagacttgctgtagcatctaggtactgcagctgcaagaacttcatgttggaaaccaatgagacaatagatataattttctcaaacattttttgtagagagactgatcacattcagcaagcaaccacatgtaggttgtcccatgctctcttttatagcagccctcaaatttaatttcatttaatttgtcataagaagctttgctatatatgttgaaacatttattcaatactttgaatacgaacaatagtgatctagatggtggggttaagaattgatgactaatttctcaatagaacatatatggccagaaaagggaggaatgatgaagctattggtacaaggcatgaaagataggtagttattttaaatcattgttaaactggaacattggtgattcttgcaagaaaataagacaaaggaggaaacagaataacaacttcaaaaagccttccactagctaggtgaaaaggaagaaacagaataaactggaaaattttcttgataattgattttacgctggggctcgttgtcctgcaaaccatattccctgtcacggtatctccaataaaataaaattaattcatgcataagttaaaaattatccttttttggaaagaagttaaacttttttttaagaaactaatatgagaacatttgcaaattagtttggaaaaaagtttatttaatttttctttcttattgtcttttcctataaatttgtatagaaatctttttctatacaaacccaaagttaccatatggtaatgttcaataatacaatctcaagggggacaatgtagcaagaggaagaagaaaagaaaagaagaataagaagggaagaaacagttggatatgcaacatgatcttagtaataatgtttctgatagtggaatcagtatatgcaacagaaaatgggctgaagaggggcgtatcttatgagcgggatgaaactgttatgaaacagaaaatggtggagatgaagaatagagatcaaatagtaggaagtgaaaagataaagatatgttatgaggagggatgcagcaagagtccatatgagactaatgatatacaatgagcaggggttgggggaaggattaagtgaaagtttattaggaatgtggtggcaaaggagaacattcaagtgttgtgcattcaagaaaccaagatgctggcaaatggtgatactctatgcaatgctctctggggggaaaatgaggcaaaaagtgtaacaagtccagcaattggatcagtcgggggattactttgtgaaactcggaaagcttggaggtagtaagttctttttgtggtgagggttatattggcttggaggggatttggagagacacacattctttagttactattgttaatgtatatgtaccttgtgagagacaaaagaaagttaaattatgggaggaacttactacaaaaaaaagggccactagcaatatcaagtgttggtgtatcttgagtgatttcaattgtgtaagaagaatggaggaaagaggagtgggagtgggagattataatagaagtgagagggaggctttcaacaactttattgaagattatgactctcaataaccttaatcgccgatttcaatgcatggatttctcttgccatgatctcattctgcaaaaacacccaaataaatacaggcagtgataccatacatcaggtaaaccaatcacggggaggatacttacaagtgacttaccttcttcggaaagtcttttaaaaagtttctgagactcattcacatgagctttcaaaatgggaatcggtggaatcttatgagcaagattgaacttaaaaacaaacttgacagctagaatatgtttgctcctgtcaataagtttctgcacaagatctgcaaaacaccaaaacaaaatttcccccacaagttaaaccaccaaaaattgtaacgctagaaatcaaataatagcagcatcaccatttcaatataaccttgcaccatttttttttataaaaaaaattccaacttcaagatcacgtaacataaacactagggggttaatgatgttttaacaccctgaaaatgggtaatctttagtttttgtccgtgactttcaatatcattagtttccgtccatgtgttttagtcccctaaagctaaaattaggaccttgtgagagacaaaagaaagttaaattatggtattaggggataaagtttggatattggctaaacataggcacgaagatcttaaaagtctgggcctaaaaccaaagatccattgttttaggaaataaaaacgccattaaccttaaacactattgtagcaacaacaacagttaagaaactataagtacaacaaaaaacaaaaacataaatatcgtttctctaaatatttgtataatattagtaattttcatgtaaatatcaacataagataacaaatatcacaaaaaacagtaaaaacactaactttagttaattttataaagattaaaacaaaataagtgcataaataagattaaaatgatctttttgtggttttataataaaaacaaaactgaaaataaaagatttaacaattaacaaaggtattgtcgggattagacttcaccaaactctactttcttttcactttaatgcacaacacatattccatttgtatttcaatgttaaaatcaatcaataaatatctttgtagctctgatcccttagatgaaaaaagtcttaatttctttattaagtcttgatccctcaacaacttaagaaaaatgacacaagataataatgaactaagcttcattcctaaacaacaagttcattgggtattttgtttcagctctatagaatgaagacattttcaacaacaatcatgtcctaaaattatgtcatggttgaccattccacaacaagcattaaacaaagaaacaaaatattaacattgaacacaaacatacatacatacatatatatatatatatatatatatatatatatatatatatcgaaagagagagagagagaaaaaaaaattacacaagtgtaactttgataactattacatcattctataacttataactgaataatgttttcttaaaactcattgtttgattgaaattttttcccacttatatcacatatgcaaaatttcatattaattcaaaatcatttgttatttcgttcatatatactaaaattgacttaatataaacatttcaaatatactaaaatatgaataatttgattacccccttggtgttgtttaattttgacatatacaatcttaataatatgtagatataatttaacgattgaataaaaaaaatcacattctatatcaaattataaaaatgatgtaaaaattgtcaaaattacacatatataatttgatctctttttatatatatatttaccaagatgtacaagagagtttgagtaatgtttcacctacttttaacaatggagaaacttagttacttatagcaatgagtagctccaaaatacatgaaagatggaagagaaatggagaaaaggacccaagggaaaaacttatctccaaaggaatagtgagaacttcgtgtctctagacaaaagaaaaaaaaaatgaaggaccatcctttattagacaaacatccactttaaatacataagaaaacttttcatttttggcaacaattttcgcttaggcataaaatttggtttagttagaatacatagatctcaaatgaacacaacaaaactcttgctcagccatcgattcttgcttagtcaggcttgaaccttttgttctctatctgaattttagcttagcctaaaattatggcttagtaactgtaacgcatttccttacattttttcaagcttttgctcctaattttctttccaacttcaacctctatttctacaaaaaggaattagaaatacaaagataactacaaaataagacaaccaactaaaaagttaaaactttataaaactagattaaattgagtttaacaagactccaaataagaagaaaagtgagatctctaaatttactcacaaattaagtatcgtagacaataatcagatgcacaataccatccatctcctaccagctcaaataaagcaaaaaatcaaattcaattaagggattgcaacctggaactaaaaccaaagatgatcctcacacaccattaaccctaaacactagtgtcatagcttacaacaacagttaacaagctgcaccaacaaaacaaaaacacacagttacaccataatatcatctcctaactgttcaaatataacaaaaaattaagggacttcaacctgaaactctgtctcatttcatttttttttttttaaattttttttctccaataaatgtttatgatttatccaatcagacactcaaagatgactatttttcaaggactaaaaacaccaacaatcctaaacactagtgtcacaacaacagtacggatatgaattgggccataatgcttgggctgctatgccctgatccagtacggatattaattgtatattatttggttaatatataattattgtagtataaattttaagaaataattgccgattttttgaaaactttctcaacaagttaatggggaaaagttcccctaaaataaactgaaacaaatatacaattaccaatttaccgtaatcattattggaaatcaaatcttgagcttaaagtgatgatccacttttcttttcgttcgttggcaaatggcacctttggtgattcaaggcctttcatgcatgttgaaagggatggtcatatgatacaagtaattaactcatggatgaatgaaagggctacacggacttaataactctaactaaaaatagcatttccccataaaataggacaatttccaatgaaaagaatcacattattcttacgttgagaaaccatacggaagattttggaaatgaaagttattcacatattttggaaataaaagtcatcttcacgcgaagcacatcacaatattttggttaagatattttctcccataaatcacagcaacaaagtttggtaaaatctttttaatttcttttcaatggtgttgtaaagccagcaaccaattaattattttaattccttttcaaaatatttcatcaaattgaggagtagaaatcattaatcagggaaattaagatgcatagaacccgcaatgattttacatgatcttggacaatccctccatgcacgggatggataaagtcgaagtacaatgttttccaataattttaatatcttattggtataaatatttgaaataatattacttgtgtttagtctttgttatttgagccacataagatttcattcaataataaaaagagttaataagattattagggaagcaataatccaaacgaataaaaatttaaagaaaaaatcttcaaaataatatatggtttgactgatataaagcattatttgctttatttataagaattatttgttttcaaactatatcatacaattactatatcaaatgcgattcattcttttataataatattttactgtaataaaatggaagaaagggcaagtggcattgacgaactattgttaacttcaaactattacttataatatgcttagtcaaaccttaaattttgaaattttttttagtcaaactactaaaaaaaaacttatttaccgagaaataaattttttaattagtaaaaaaaattaaaaactaactgaaatgctacttaaagaatttttttttttattttcagttttaaaataatgttattaatattattatttatatgttaaaaaatgttttaagcaatataataatcaataataataaagtttttttaatttacttttactttttcaaaaacaaattaaaatttaattgtaccattttttgtaataaagttcaaaataccaaatacattcttttacatcatttgatatttataagtcaatttatcagttaattttattaaatacttttaattagcttataagtttttaaataattttcaacttttcagtttataacttataacttataaactttcaactgattttattaaacatagtctaacatacacgttattttatatattgataattttataaaaatattaaaatttaatttaaaataaagataaaaatgataaattaataaaaaaagttaaaaaaatcctttaaaaacattatagtagaaaaagttttcttaaaaacacaagttttgttctaataataagattaactttttttctcctcaaaacaagatatttctataatcgaaagtcatgagactaatcatgagactaatcatcgaaacataaaaatccgattttatctctcccgatatgttttttttcatatgcaccatttgagaatctatctctatgaacatgtttaaagaatcaaattatctactaactctattatatcttattgatagatattttctttctacttacattgtttaaatatcaaataatataatcacttttatctctcagttttctttcttttttcatgcacatagtatatctgactttaattgttaactcttttttcccccagttctctttacttggattcctgtcaacagcaagagaatgtgattctgaagccacaacctgattttgttatttctttctaatgttttcttttcttggaaggtaacctcttccccattacctggaaagctattagaagcacctcaacacgctcatccatcattgtttgccccgcacgcgctgccgtcaaagccttacgcgttgacccacaaaacaaaggtttatttgactttcctcaacacccaaaaaacacgatgcaaattgcaaacccgtttccttagttcggcacttcggctttaatattattaacaaatcttcatttacattttttgatacagaaagtatcaattaaaagtaaatatattcgatatcttaaaatacttttttttatgtttaataaatagaaagaataatacaaagatattatagaaaattcaaaaattattctctagacgttattataatgacataggaaaaaaattctctttcatttattggaatttacccatagcagagatatagacacaatgtcggaaaatttcactaaaatgagagaatctcaatccaatggcatatacatctccaatgagtcatgacatgacaatgatgagtgtggttaaaagacaatcaattcgtttgttttttttttttttttattaatttgtctccctaatcttttatttttaaaagtcattgaattttaagtaattcaagcagagtaaaataaactcatttttaaaaaaattctactcaaacttctttttatttacaaaatttgaattgaatacgtaatctcaatttaaaagaatcaagtttttttttgtggttgatataatttttaaaataatttttaaaaaatcaactaacttttcatgaatggtgagttttgttcagatgatagtatcaaattatttttatatttgttactatacaattttaaaagatatagaaaaagttgaattcgaaaaaagataaaataatgatcaaagaaaaccgtcaatactttatagtttgaattaattactcctcaacgctgcatctttaataattataaatagtcacatttacacgtctctgacctctcccctcattttttgtgtctgatttgaggttggagcgtagtcagcttctcttttctgccgaaagctgcagaattgtgttgttttctctcccttgggggtcaagcaatcggttctcttcatggttatcaatcttatccttcttctttcatgcattatattcattcatttaccattcttctcctaaacaactcacatagcccaccagatttgaagtattctgtgtgtgtttttctgttttacttatataaatatctggtgagaaattattgtatggtttgatattactacatgtttataagttcagccaatattcatatcacacataatcgaattttattatctctttttagtgaattgaaaaacttgttcacatggtaagagaagattgaccgacatgaaaacgtgatataataaaaatcaatgaattaatggctagacttagttgcagaaaattattttttgattgatttttctttgataattttcatctgaagacttcaatggggttgttttgttattgttgttgtttgtttcctttttcttccacaaaatttagtggcatgctgaatttgatttgatatgattagattttgccgagtatctgattggtcttacatgtgatagatgccgagtgttaaccctgacaaagattccgagccatttgttgagaccgatccaactggtcgctatggtagatacagtgagttgcttggatgtggtgctgtgaagaaagtgtatcgtgcatttgatcaggaagaaggaatagaggtggcatggaaccaggtgaagctgaggaacttctgtgatgatcctgccatgttggataggctttactctgaagtgaggttgctcagaggcttgtccaacaagaacatcattgcactttacaatgtgtggagggatgagcagcgaaacactttgaatttcatcactgaggtttgcaccagtgggaatttgagggagtacaggaagaagcataggcatgtttcgataaaggcactaaagaagtggtctaagcagattttgaaagggttgaattatttgcacttgcatgatccctgcatcatccacagagatctcaattgcagcaatgtgtttgtcaatgggaatactggccaggtgaaccattttattcaaatcttattttccgtccagttatatatcatatatgtttgattgattatcaaggtgaaagtaaactaccaaaaatgcaagaaaaagttggattttttttcttctttttcttaactttcctttgactcgatgccttctgtgtgagatctaagtaattaacttgagcaagtcatggatgatgtctcctgtttgcttgacaaaaacgatcaattacattgtttttagaatactaatttggtgcttacttttttccttgctctgtttttgcctataaatttctactatgaaaaaatatgagaggtgaaataagtgatgcattaaaactataatagggcaagaagatgggatagcataagaaacaacacgaataatggaaaattgaaagtaaaaaaccataatagtctaagatattttgattttaaactatttttggaaactattcttatcaaacatttttttggtttagaaacttcaaacttgtttgcctttagccactattacaaccaaggttaatcttagttatgctgttgttatatatgtaattaacataaaggttttgttagtgattgtatcttttttcatggatatcaggttaagattggtgacttggggttggcagcaattgtgggcaagaaccattgtgcacacacgattcttggcacaccagaatttatggctccagagttatacgatgaagactacacagaattggtggacatatactcatttgggatgtgtgtgttagagatggtgacagtggagattccttatagtgaatgtgacaatgttgctaaaatatacaagaaggtgtcttctggagttagacctgctgccttgaacaaggtcaaagatcctgaggttaaggcctttattgagaagtgccttgctcggccaagggctaggccttctgcagctgagcttctcagagatcctttctttgatgagattgttgatgatgaagaaaatgatgactgttcttgttcataccaatagaatatttcttacagtgttgatttgatatgtgtgtgtgtgtgttttttttttaaatttgattcacctaccttttcagtatgcaatgtcaatttgggcagcctagaactgtgaacataaattgtttatatattttttccatttggctagttgtgaaattggataaggtttggttgaatatgggggttaccaggggagggcttgattggggttggtgtccttttgtttttgtacataggaaattttacagatgagttgtgcggcatacattgaatgatgatttgatttgacaatatatgttaaaatagtatattagatgttatcagcagtcaagggatgtgtgatggaataaatactatatcttgaaaaataaaaatagtactaaagatgtaatcttagaaaggaaattgtataaaaaaatataactgtcccattttagaaggacgtgattctagtaaactaaaggatatgtattaacgatttcatccaaatataaaattacattttaaaaactattctcttcatccttgaaaatcaaatcctttatgtactttttattttatcattttgtagtgtacaagatttattaatctttttatacaagtttatttaaataaaccctaaatttaccatccttaagaatgttggaatatcaaaaatggtatttcaatatttgaatgcttccttttattgccaccttcaataatggaaatgagatattggaagcaatcaaaaacaatgtcagaatgaaaagggttttatcgtttgatttgagggcaaagaaaagtgaagtcaagggtttgaacgcagtttaagcagcatgatatatgttggaggccagcttacatataataatcacaacaagcaaaatgagttgttcatgttttaaaaattggtccaacggctaagcttaatgatgaagagaagtaggtgtgaactaaagggtatttagacttgtatcgtgcaaccccactcatttttgttgtgaaattaatcaaattattgtagtgacccgttgggtgtaccacatcttttttctccttaaaccaataaggaattttgacattgacttttcttattgttttcaatattcttttatttgagggtacgaatccaagcattgtactttgcaaattcctcacgaatgccaaagaactactacataattcaacaacaataaaataatatcattgccaaaagaaaataacacttatcagattcatcttctgcaagagcaaattggagataaagacaagtacaaggtggttaaacaaccttaggggcaatttcaatggaagtttgccaatggaattatggcaggggaatatattccattttaatttcgttacgtttgatgttataacagcgattgcggtaatatcgctcatatattagtacttcatatcatgcaggtcaaggtagatagaggaaatattttttgcagaggtggaaagtcaatgaatgtttattttcaattattaattagttgttcatgtataatctaacatattcaaggcacggcacatgctaatgctacaattagtctcctatctatataaccaggtccatgacagctatttgccaaaaaataagatttttttttttttgttttaatgtaaaccagtttaggcaatacaaatatataaaaaaaatacactatttcaaaacagattgcattatgtagttcattaattaaattttatgacattaatgataaaaaaaatagttgcttttaagaactaatttattgtgaatgattttcttgcaaaaattatattaaatttaaaagtgcgatcagagtattaaatttaaatttggaattaatttaattactttcacttatattgatttgatttagaaatatccataatgaaaacttataaagaagataagatttgaattgatttgtaaattaaccttaatatttggatcaccttttttttttaatcatatttggatcaccttaaaaatggataaaattattattttaacaactttatattatatcgtacttacaatagataatcataacatgtttaaattaatagattagtaaccaaattgtactttccattcgatgatatatgtagcaaaattatttatatttagaaaataaataacttgtttaatgtgttgaattttacttaaatttggctgaattctgattagtctggtctcttttctccattgttcggaggtttatcattatgcacagttaagaggaagggatatgtttccggatttgaacctatgaccaataaatcagcaagatataactttaccgttatgtcaggactcgtcctcaatcaaagataatatcagaagatttataataactcatacactatattcaatcgactaagttaaatctcccgaaaaattaacgaattttatattaaccaattgttagaagtagaaggtactgaactttttggtatgcaagcagagttccagggaagtgtacacatgagataagatatatatttcacttggcttgtgacaaataatactcacttccataatctctagttatgcaatttaacgtgctactcactaattctttcttatgcaatgactcagccgcatactcatgaccacagtcccccacaacaaatataagagttaaaaaaaagtggtttaatgtactctgtcttctattattttcctttcctttatttactgtgtctagtctcttttctcccaaacaagagttctgttttcccccctttctgcgtcatttattgcgtttacctataagacatgcaggatatgatgataattgataagggttaagataaaaaagggaaaacaaaaaataatagagtgaaaatcacctatgtatcaaggcactcataatgtctataaacactctcaattttctttacaaatcctagccggcacacctataatcgatgtcgtccaacattcacccatattattactcaaataaattaattaaaattattcattcttatgtgttaaatgaatatatatatatatatatatatatattgtcaaaataaaaaaataatatattaacgttttggtgctcacatcacatctataacagctttcagcacggttaatgtttttaatatgtttggtttagaatcatgttctccagatccatttttattaactcttatatatatatatatatatatatatatatatatatatatatatatataagagcattgctatttttgttaccaaagaaacctcagtacaaattgtaacgaaaagtgttaaactaatgaaaaaagtgttatatattaatagtataaaagttttattatatgtatctaattataatttgtgattgaataatattttacattgtcagtatcttgataataaactctaatctagttacgatattatttgtcagaaaacaataatgataatttgaatagataggcaaataaaaattggccttgtaacatttatatcaatttgtgcattttttagtattaaggattagttggacttttgatccctcaagtatcataattgtacaatatcaattttaatttttcagattttaaatgtgtcaattaatatcgaattcctcatgtattgcaaatatttgattttaatcctcaaagtatatttattttttctttacccccaagcgtgtgtgtatatatattaataagaatgatgttgttctattaaaaaaaactaaaattgtaccattacaatgttagaaaattcaattaaaatttaagaaacttaaattgcacaattagtcaattatgatcctagacgatgacgtgtgacaaacctttttatcaccattggatttattatattttaaataaaaggctgtgattttactagctttatctttttattttattttatcaactttcccaaattctcgtgagatcccttctctctaaccactatcgtgcaatttctgctcgctcacaataacctgaaagctgtaagaaaaaaataaccatacaatacaggtgaaagaagaagaaaaaaatgaaatcttaccttacattaaaaagaataaaagggaaatttaataaatacttaaaaaacataagatgagtaaaatataggaaataaaaagctaaagtttcacaaatgattactagaagtagtatctcaaaaaaacattacaatatactactaacaaggttaaataaggttttcaacctcaacccaacatgaaaaaacttacaaaaaaaatctcattttaataaataaaattcatgatatccttatttctaataatacttaataaaagtaataatactaataattatccagaattagagaaaaaaaagagatatattttttcaagctaataaaaaaaaatagaaaactaaccgaaatagcgtttcgaacataacggtaaaatttattttttatacttatatatatatatggggtaggtactgaaaagaaaaggtgaatattttagttggagaacagaggatcaaaactcctatctacacacgctgtaaaattttgaaatcccttgtacaaacacttccttagtttatagtaggatagatgcttcatgacaagagttatactgataccttgcaattatgttgtcaatcccgatatacataccattcatcaattttggaacaacgtgtaattttatattgcatgtagatattaacgatgtaccactaaaaacaagtattacacgtatctagcgaaaacttctaagaagagacatgtctttatccaatgcacaaataaagaagattgcaggactaacatgattctctcgcgaaacccttagctacagaggagaaagccaattggagggggtgaccacaaaaaaaaatgcagaacacaagagattttgctgtgtttctaaggaggctagtttcctttgctatccttattttctttatagtagaatgtacaagaggtgattcatcagaatctgagtctttcttcaatttcataagggcccttgatcccaaaaacgtgcttaacattacctggattgagtcaccatcccatccatgcttggtcaagttgaatggtgtaagatgcaacttaaatgctaccaatattgtacatataaggcttgataacttgaaccttagtggcacaatcgatgcagattccctatgcaggctccaaaagttaagagtggtaagcttggctaacaacaacattagaggaaccataccacactcaattttgcgttgtacaaggttgacacatttaaatgtaaccggcaaccaattgagtgggaggttgccaaatgccttaacaaaattgaaacatcttaggaacttagacatttccaataacaacttttctggtacgatccctagtaaacaacattatattcacctccttagttattatgtgactccaagtaacaagttggaaagcaatagtaccaaagagtggctaaaggaaagtgacacaaacacaatacagcaagcaacgccaggtcctttaagcgacagcacacctaataatggcaagaatccacggccagaaaccttgggggtgatacttttgggtgctggattgcttttgtcaaccatttactttattgtaaagaagtcaggaaaattaagtgcagagagagaggtagttaaagaccatcgtcgtttgtctccaataacaaaggctacaactcatgaagttcacgaggtgaagctaaaggaaggagattctgagcttgttttctttgttgaagatcgtgaaaggttcacactcgaggaccttcttcgagccaccgctgacttgaggagtgaaggcttttgcagcagcctttacaaggtgaaattggaacacaatgttcactatgcagtcaaaagattgaagaatttgcaggtatccttggaagaatttggtgaaacattaaggaagataagtaacttgaagcatcagaatattctcccccttgttggttatcgttctaccagtgaagaaaaactcatcatttacaaatatcaaagcaatggaagcctgcttaatctgttaaacggtaagttaagattaatttgtttttcatcagctgcaacactccatatcatcttctctatttgttccctaacttgtgctgcacgagtaattatgtttctgccttgatcatttgaacaatctagctgaaaccccacattagtacattaatataaggcaaatgctaataagtgattaaaaaaacaaagtgattttttttttatcaaaagtgaaacatttaatatatcatgatataaaagttatttgacacttaattataagtaggaatgactttagaatatacagaattacagatagtgtgaagagtttttacattgccatccaatcatgaattgtcatgtataataagattgttgatgacttttgtaataagagtcttatttctaattggttgatagcataaacacaccaccaatgtatcaaaactaaaagtaattgattttttttttttttatgcagattatatagcaggtagaaaagatttcccatggaaaatgcgtttgaatatagcatgtgggattgcaaggggtttggccttcatatataggaagttggatggagaggaggaggtcattcctcatggaaatctcaagccatcaaacatccttcttgatgagaacagtgagccactaataagtgagcatggcttatcaaaattcatggacccaaatagaggtttcttgttttcctctcagggatacacagctcctgaaaagagcctaacagaaaagggtgatgtgtatagctttggagtgattctcttggaactactaacaggaaaaagcacagaggtgagtagaatagaccttgctagatgggtaaggtccatggtaagggaggaatggacaggagaggtatttgacaaagaggttagggaaaatgatcatcaatgggcatttcctcttctcaatatagccctcttgtgtgtgtcacgtttccaagaaaataggccaaccactatggagattttggagaagattgaggaggtcatggatcaacatgaacaacatcacgaacgttgtgcttccaaatgctgttccattggatccaaccacgatgagtgttgttcacttcacaaaatcatacctgaaacgtgggattctccaggatcaaattattgatttatcttcatgctccctataataacatgtattcacctatttatatatcatagtgattcctgtgtgagagcttttctaatttagtcccacatgacttagaaactatgggcattatctagtagaaaaacatgtgatactttgtagtcatcggtttgttataaaggaattaatcctgtattctggaactatgcttttgaacttgattagatacatgttattttaatattttgttaattatgaattttttaactatattttgctatataaatgtagctatatatgcttcaagttgttgattatatagacaacaagcaaaagcagacaggtgttgaaataagtgtactcaaaattgaatttgtttaatcaaatgattaatgtgctgaaattaaagttgaattgtttaaataatatccaaatttgatcatttgtcaaactttacttatcttctaaaatatacttcaaattagtcacaatttatttctcttgatgaaacagagttaaagaccaaaaaaattgaacttgtttatcatgaaaggacaaggaaaagaatcatgtacattccatctgaaatttcaataacatatctgtagaatacaatgatgttacctaactcttaatatatgctaaaatgctaataactttttattttttatttatcccaaaacaaaagagtgtggcatggtggaagccctactgaagctacctggatttgtgggttttacttgaatttttacccacctgaacagatgaataatgataagcatgtcatgcgattgaaactcgtttgggttgatttttcaaaagcaatgagcgtgtgcggatgataattactgctacaaaaaagataaagcaatgaaatagttaatcgaagaataattattatgtctccttgagtcagttcaagtgaaattgtgaaacataaattctgagtacaggaattcgatctctgttatatatttccccttctaaatattttaacttcagattagcttattagaggcttttaatcaatttgctctaacaggtttatctatttggcatgtccaatccatataaatccctatttgtcttacctcgtcaatcaaaacaaaagcaaattggaaaacttaagggaaaaataatatgaaattcctagaataaaacgtattactatatattttttttttggcataaatatttgtgtgaaaagttttattattaattttcatgtataactatatcctattatatcccgattaccaaaaagtttaatttttaatatgaaatatttatgtgagaaattttatttactttttataatagtgacaatggagtttaaatctagaacgaaacctcatgtaaattatctaaacctgttactatgaagttgatccgagtaaaagttttattattattattattattatatgaacatgatgactttatgataccaaacttctgaaaaataacttgccaacaaaatatgaaatttgaaggttgtgtaaaatgtagagagtgtttagaaaagaaagctcaaggaaaataacatcttactatgaaaaagtccaaaaaaagagcgtctcaacagctgaggtctaagttgagtagcatcaaaggcttccaaatcctaaggtcaaacttgggtttccctctgctatttattggtcttcgcagtgttgattcaccgcttaaatgtgcttacgttttttcaacactttaagggttttttttttcttttttcttttttccatacacttgaatgttctagcgtgtaggaactgtgccgcctagtgggctcatactgcagtaaaagaaatccaacttggctctttacatgggactttcaatagcattattcatggtcgtgcagcttcggggattaggggcagcatctgctgtttggctcttgctcttgcttctactgtttattgtatttggtcatataggaactctattatttttaacgggcacgtttttaatctttctgatgttgtggaaaagattaaatttcgtgtgatttggatgagtcatttgtcgcacttgtattagcaactcttttgctttgattagttgcttctctttgacaagtgtaacagcttttgctgtttgattctaccatgtatgtcctgtgtattttgtaagtatcttattggttaatatactcatttacatattttcccaaaaaaaaagaaatccaactgggaatagaaaggcctttagagaagaaaattacgattatttggttttaaaaaaatgttttattttttattttcatttctactcataaagtattatactttattttttcttcttcaatatttcttatataagcttttaaaaataagaaaaagaaaaatgaggtcaatgcgttatgattacgtagtacgttatgatgggtttgttttggaaaaaacccaaggtaaggggttactccagattcagcttcaaatattgcgatctctgcctaagccttttagagtagctttcaaggtgtccataggaggaaccaactgatcataggaatgtggaaaaatatgttaccaaccagtctttccgtgttcttgttttccttcatatgtcaacttggtgtaactcaacgttgagtgttcacgtagcattgcataataataataatagttattagacatttgttgttggtttttcctttgtttataggaattacccgtcggtttgagctgcactttcagttgttaccccatcaaaactctcaatcaaattttaaataaaataaacaaaaaagttgatgctccatctactcccacaataacctaacattttaattcttttgttactctatctttaaaacgttgtaataatctgcaacatttaaagctcattttgaatccaaagcatgaaaagtagttggtgtgaacaattttagactctttttcttaaataaaattttgagtttggatcttgtggagattaaaaacgtaattgaaagaaaaaattccattaaaaatgataataataagtcaatatcataatataaaaaaaattacaagaacaaaatcttaagatatcattatttgtattaacatcatgatcatggatgggtaaggatattaaagctgaacacaaattttaaggatgaaaaatgcttactatcataaatttaaaacgtttttttttataacaatttaaaacgtttttatctctgtgtgtaatcaatacgtaaaataatttgaagtgtcacgtaacatattcttattgctatggcgtttcctatttccaatccgatgattccccaccccccccctcctcctcctccctctcctctcctcctcctcctcctcctaagtatgcatatatcattccatatccaaaacaattaataaattatatttttttcacttttacaaaaaaaaaaaagttatgcaaaatctaaaaaagacgattttgtaccaaataatatgagctaaatcacctacaaatattaattgttcctcgagagtaaaactactacttcaatatgcattttgaagtaaatattagtccaaattctttgaaacaaatatcatcatttcattcgttatttccagaacggttttgcattttgcgagctgttagatgaaaagcatctccaattgaatttcctctttggaacatgatgccaagtaatggaaagcataaattagttttcttaaatatatataatttatacagagaggatagtaataaaatatctaatcaaatttgatcctatataataaatttacattttcatttttaaagtcagatattttttgtgtatatttttctctttccttctgtaacacatgtcaaattaatgtccattcagcaaaaaaaaaaatgtcaaattaatgtttttccttttaattaattattcacttaaatggtacatgtattcttcctatttttttcttgttacctttttctttttaggttggatttgctaccttatatctatataaaatataaaatatatcaaattaataattactataacaaacaatttgttcaacaactccactgcatctatatatattcacattaatttattttatgaaaattcatattatttatttaaaagaaataagtaattaggtgatttacattttccctttatatatagttgaatttatttaattttaaaaataccatgatctgttgtcatttgctggctcctccaaatattcttgcacgatttgcagtgtgtgtctgtctgtctctctctctttctctcttaaaatatatctatttatatataaatagtgaactgtgttttgcccatctttgcttcaaattccatttcttttgatttaattaagagtacctagttgaagcaagcaacaagataagaaagcaaaacaggagagagagaggatgacaccacatcctctgttttcattctcattcttagttttccctgccattcaaattttcacatgacctctcattatttattttttattattagtttcttttgtttccatcaccaaccattcatctttggatggtgaattccccatctgggttcctctctttttcctttgatctcttcgccttctctcaatttcttcttctctgatcccagaaaagaaacaaaaaaacaaactaaaaaaaacatttaagaacatttttttttataaaaaaaacatagctgcttggttttctctctttgctggattagatattttggttcagttttttttattgatgctccaaagatccgattctcttagatcgaatttggcataacccacttcgtatctgattgaagcaccaactgggttctgtctgagattcaacataaggtgacccttcttcacagatttatctaatctgcatttctgatcgctttgctttgtttttgctcatgaaaaattgaatctttctggtgatttagctcaattatgcattattcaatcagctatgcatttagattggttctgggactggaactttgcccatcactgaataatatagaatctagattttgtgtattggaatttctaattttttttatgttatattgttttttggtttggcatgagaattttgattcaataagaatggttggattggatttgtttgatgaaatgagtgattgatggttaactgggcatggttggtgacagaacagatggagtcggatcttggcaagctcttcattgggggaatttcctgggacaccgatgacgaacgtctgaaagaatattttgggaaatatggagaggtgatagaggctgtgatcatgagagatcggacaacaggccgtgctcgcggtttcggttttgttgtctttgctgatccttcagctgcagagagagtcattatggataagcacataattgatggccgcacagtgagtttttcatcatagatttgttaagcattatttcaatatacatgttatttggatgggcagtgatgggacctagctaaatttatgtttctgatagagatcattgtgtccctacttttatattttcttataggacaggaagctgaaaatgacttgcagatttgatccgtgtgtgttgtgctgtcaatttgcaggttgaagctaagaaagctgttcctagggatgatcagcaaactataaacagacagtctggtagcatccatggatctccaagtcctggacgcaccaaaaagatttttgttggaggtttaccatcaacaatcacagagagtgattttaagaagtactttgatcagtttggtacaattactgatgttgttgtaatgtatgatcacaatacccagaggccaagaggttttggcttcatcacttatgattcagaagaagctgtggacagagttctttataagacatttcatgaactcaatgggaagatggttgaggtcaagagggcagttcctaaagagctttcccctggacctacccgaagcccattgataggatataactatggtttgaataggaccagtagcttcctaaatagttatgctcagggtttcaatatgaatccaattggaggttatggagtcaggatggatggaaggtttagtccacttactagtgccagaagtgggtttaccccatttggctccagtggttatggaatgggagtgaatttggatttaggattgaacccaagctatggagggacttccagttatggtggcggtcttggatacgctcggatgagtcctttcaacaatggcaactctaacagatataccactcctattggcaatagcgggggcaatgggagaagcgattctcttatgaactcagcttcccggagtgtttggggaaatgggggcctgaacaatgctgccaatagtccagtcagccctggcgcttacttgggatctggaagtggggcttttggtgtttcaattggaaatggtggcaccaattggggtccatcagttccaacccagggtggaggggctgccactgggtatagtacttggggtaactcttatgaaggtggagataacagcatcagtttaggaggtggagggtatggaaggaacagcagcccaagtgtgcctcaatcctcaacatttactgcaccaactggtgattatgaaggatcctatggggatttgtaccgcaatggttcagtttatggtgactcaacttggcggtctgctgcttctgagatagatgcttctggttcgtttggttatggtggacttggtggtatagcttcagatgatccagtaaagagttctgagggttttattggaaactacaatgtaataagtagacaaactaatagaggtaagatctttggctacatgcttgtctcatgtagaaaattagatcatagtttatacattgtctgttgtttattccattttttcataaaaccaattgtgtgttttggactttctatgtttcagaataggaatattactgaagaaagttgaaaactaagtctgtttattttttaatgtgctattacatttgtctttaagcttatgatcatcatgttagaattgtgaatatagataaacataacatggaagcattattcatgtcttttgattatcccaaacaccctaggttcctgactttattgacatgtttcctttattcctttattcttgatgttgtcattgtaaattcttactacagtctaaaagtatattagggcctctgtggtttgtttgagaaaacattttatgttctcatttcttattttcgcatgtaattactaaaatatcacttaatttttactttatgttttcaaagatttatataggaaatagtgaaaaccactgagaagttatattttctataaaataaatgttttcaccatttcttgtgcaaatctttgaaaacaggaataaagtaaaaaacaaagtggcatttttttaattattagtgaaaacaaaaagaaaaaaaaaaaagaagaaatattctcaaaccaagtatgcccttagcttgctgtaataatgcctgagtttcttgattactttcatttaaagatattcaaatttgatgtttcatgtgaagttatactaacttgcaagatgctagagatgtaggcatagattactcactcttgttaattgagtatgatgattttctcaataattaggatttgagagcttcaaactgtaaaacagaatatagacatagattacacccctttgattcgttagtgaaaaatgaggtttgattatactttcttgtattatattgttgtgaaagggttggcatttgagtatttccattacgtttttttacctgttctggttcaacttcattgaatactcattttcttttgttgcatgtctacttgtttcaggaattgctgcttaggagatatgttaattggatatgttatggtaacagtagatcaagggaaactgattaaaggtgaaatcatacggaagctaaatcagtcacaagtgtttttgtgtaaggtttgggatttttgttgtctttatttttcaaggctaggttcctttcttggaatttgattgaggtgtaacatcagattgcgggatatactcaggaagattggttccagtagtttaattgtgcattgctggagggatgcaccatcatcgttaatatgcttaatgatagtttattaatttttgatttttttttttttttttgccactgtaatgcttggcaaagctgtttgttcttgtcaccatctttttcatgggacatgtttctgatcaaattgtaagtgaagttctgtttgatttatcaggtttgatacattagaggggtacccatcttggatcccccatcaaataattagttactggacagatattattttttgttagacttttgttatacaactttatactttggtttattgttacattcaaaatttggttcctgctgatattacgactctattcataatagttgctttctctcctgtttggttgttgtaactttgtggtgaaaatatcgagcatgctatagcatctttttatggaccaaaattgattggttaaaataagggagcatggttcatttttttttggtagcttatgtttgtcaatagtaaatactaaatagtaacttttttagttttttggttgtttcttacaattccaatttggatcttaagatagaatttgtgtgtggtcatgctaactcttatccttatatggatcatgatttgtcttgtatcactttcagttttcccctgaaaaccccccattacaatgtggtcctctctctctctctctccccacagaggacacacaaaattgtatataactatatatatatccatagtcttagctattaaacagcttatattaacttggatgtgcacaattattagtacaatacttgggtagaatatcattattctaagccatgcaagcctgtgttggagattttagacgattgtcacatgcaaatccatataaatgcacatgcctcaattatgttgaaggttgtggttgtagacatatggtggaatctttattaatttgaagacaatagcgtgtggcaaactggcaatgacaaaatcatggatgataacaatgtttcgtttcagaactccttggaagtttgaatgggaaaacaatgcatgaatgaaattgaggctctatagataaggatgttggggatattgaaatatatgataccataactattttcaaaagcaatatgccttaggctaacatcgggacatattcttgtgtatttcttttttcattttataacatttttggagcttttatatctaattaaattaatacttttaattaatttcaatggatatttgcaatttcctatatatcgtatattaatgaaatttaaatcagtgcatttagatcggtttgtctctttcaacttatttattgaattagtttaatttatatgcactaaaatgtgtgtttgtgtttggcttaggaaataaaagtgaaagaaaagaaaagagtgaaaattgagatgtctttgcaaatttttcttctcttgtttgattttttagaaaaaaatgaaatacaaaatatgaatataaaaatgacgtaaatatatctactaaaaaattatacatacaataacagtaattgaatctttatttataattacataaaactatccaaaaattagacacgtgtcaccattttgtgccaatttttacattttttttttctatttatctctttgcaaattgcaatttttttattaattagttttccattgaccttgcaaagcacaggtccagtgttgtagttatttaagcaagaattccttcccctttctcttcaaattcggaggcattattgaagtgtgtaggtactaggttctttccttctattttgaagatgaaaaagaatatagaaaaaaaaggggtatttaagtctgtttaaataaactttcctttccctttcttttcacatttggaagaattattagtgcgtgtgagctcatgctttttattccttctttctctttttttaagtgctccaaacaaagaaaataataaaaaaattggtgtttctctttcatccttcccatttttttcctaaactaactgtaggaggactttggtaggggaatattttttgattttatgagaattataggttgaaaaacttagttttccatgtttgatatattttttaaaaataatatttctttaaaaggatatttgtaaatcaattttccatataaaaaaaatcaatgaaaaaggtgaaaatcttaattttcacaagtaatttgtcttttaatacattaaaaatatcatcttactctttatcaaattatttaatttagtgaaaatattgtataactctttgatttttaaaaaacttatttaagattccaataatcaatcaaacaaattttattcatttccaaaaaatataattcctaagattcataatcttcagaaatcataattcttgcacataaaaaaattgctcttgtattaaacgtggtttaagaattgaaaaatgtcaaccaaaattttggtataattgctataaccttattttgaatcagctaacaatgtaaaaatggacatcaatcaaataacaatgtaaaaattatttacactgtctgttcatcaattaattattcttatcgaatcagcttggttatagagttgccataagcccataaccttatagtgtccgcagtcaaaacaagcaacatttttatactctacattgggttgttcacggagaggcattctagtaagcttttctgtttgggtcggtctttgccagcaaatgtttttccttatgggattggggtcatgccgtgtgtgtttgtttaagttttgtgatcataccaatgctcacatcacagtccatataggcttaggctggttgaatctttgtggtaggacctttagaattgcaaacaatcaaatatatggtatcataattgatgccacaaatgagatgttacaacaagtttacaacttctgctaaaagttcatccaccttttacttgatatacgactctctgtaaagttgtgacaggagtaacaatttgtcccacagcttacaaatagaattgttttattgacgaacgagtcatatttaacgcgatgaaggatattaaaatgttagaaaatttttgtaaacatataaattataataggagtagtgataaaaaactacatattgttaaccataacatatcactcggcttaaagtcaaacactaatttttcaaagtaataatatttatttaagagattcatttcttccatagatatattttcatacacattttatgccgattttcataatttgaaaatagaaattgatgtttacaaatcattatttgatctgtatgaaaacattttttaaaacattaaattattctttattaaaatattctcatttcattaattaataatctcttattttatgtattaaagatgataagagatgagggtaaagtttaaataactataattttttcttttgctaaatcaaatatttttttaaaataaaaaatattttaaagccaaagaaaaattgcataaaaatataaaattattttttaatttttttattaaacagttataaaagatatattttaaaatttattaatttaaataaaaaaaatggaagagtagaagatagatgtgatcagtaaattatattctaaaataatcatggtttcctcatacttttacttactttttttaggtctcctgttttggcattacttttgtcctatgttttaccactttcttttctatggagggctttgttttacatattcattgcgtattttcgagaataccaagttgggaaaacgacttttttttttttggaaaaacatgagttctgttacacttgccaaaagaagcaaataaataatagttagagttagccaactaatttctatacaaacacaaatttgctaatacaagtgtaacaaatgaaccatcttaagcacatgaaatttaattttctcaataacatcaacaatatttaaagtttgaccataaaaaagaatacagtttcttgtcatccaaatacaacaaactgggaatgccagagccaagcacctcatcttcccaaagtgatcggaagtagcatgctgatggattaagctattcaaagtgcctgcaatgaaatatttcttctaggaaatctgatccaatcccgaactgctgaccaaatgcacaaagaaaatctgcactgaaaaaataaacgatcatgcgtttccacatcagaattacaaaatgaacataagctttctttttcaaggaacggtgccttgtccaaattacaattttagcttataactataactagttggctagctttgcattaccctacaatgcacgggttggcttggttactaccaaattatatttacaagaaattaagatactctgcaactacttttcaaactacaagcatcttgcgatcacaccatagtttttaagataccccaaagggatatgcacactgccagattgaaataatatattttttcgatcatacccttcttctcttgcacagttgcactcatgccgttcacctccaccatgatcactgtttcccttttccaatctcaacaacttccaatctccgctcacatcttcgtcgatgctctcgacaccttcaaacctcaactttctctctctctctctctctctctctctccctctcccgcactacaactcgcgagatcaattcgccgtggttgtgcggtggtggttggttcaggattcaactagaatgggtttttgttatgtgtggtttaatttgggttttggggagaattgtttcctcatcgttggggttgtaggcaagtttaaaaaaaaaaaaaaaaaagatgcgttttttgggatgaatttgtaggtggaggagttgcggctgccgctgaggtgggggattcgtggtggttcacggtgttgtgacggtgggttttacgacggggtaggtcggatttcagatctaaggaggacattaatcgttttcattttgttctctgttgacaccgtcgatgcggagcagtggcgactacggggtggtgtcagagagggagggatggttggatactatgaagggagagggacatatcgagaaagaaaaataaaaaaataatttctatgctgacctgcataattttagggttttgacagtcttaatttttaaccaatattattacatgttattttttcattagtttttcttttcttttcaaattagtccttattttttttttaattttcaattttttaaattaaaaatatgattaaaaataattttagtagtatgaattctaattttttttagtttcctttcaacacttttttttataaaaaatcttttggggtttaaggttttataaagagcattgaaagtaatttaaaaaatagggtttaattaaaaagatgacataattttattgattaaaaaattcacagtatcaaaatccctcaaattattaagaaaataatacttttaattttatccggtgtagggatttccaccgtagttcatcactattttaaccactgatgttaaatttaaaaattcatatccagcggatgatgtttgtttcgcaccgtgagtgtctttccaaaacttttctgtcacttgtcagcaccgtgtgtttttaaatgtgttgctagtgaaagtcattggatttaaactgaatcagatgtagttcacttgtgaactcgaggatccatatcgtatataacaatttaagatagttgtatataaagaaaatagtttaattttcattgagtacaatacctcaaattttaggagaatttcattttcgttaacaaaacaccattattccaaaaatccaaaattgagtacaaaacctcaaattttaggagtatttcattttcgtaacaaaacagcatcattccaaatatccaaagttgtttaatttggataaaagaatgtaggcttaaggcccaaatcacgaaaaagaaaaagaaaagcatatccatgatgctgtacggtactcttgttcgtgtgaaatagaagaaatcaaaatcatagatgatttggtacctccatcaactttagtattcgccatgtgaacgtggggaccatgttagtaccactcgtgattatccacagcatgaaacttttgccagatgaaaatcgctttcacaaaatattgacatccaaaacaaaaagaaacacaagaaaataagatcaagacagaaaaaagttcatgtagcagttaagataggaccaagcctgtgagaatacaaagttaagattccctgttacctataacagatcaacaagtacagaagcgagaatcccactggacagtgcattatttcatttcactactgacatcagttttcattctaaatcctatgtcacctgaaagtattcccttgatccaaaggtaaccaaaagttcagaagaaagccctgctgccataaaacacacgggagttagtgctctttggtgtctgtatcttctgttcagagctagagtttcctgaactagttggtccactttcaaagtccataggaagcttcattttcgccagtgactcggtgaattgctgcatgcttttcatgtacatgtctacaaaatcctgctgcaccacattaggctccggctcgatgttaacagtcacaacaggcttagtgaatgactcattcagcaccccatttgaggagtcactcccaccatctttgacatccccatttttctcttcggtggctgaaatttgttcctgactgggagacttggaagcagcaacatcagatgagtctgagcttgcagccactgaaggagatgaaaccccatttgttaacacactgctgcgtggagaatcagccttaggaggttggacagattcaacactgcatgctgagaagctctccacaatctgaacacctgcttcagaactaagattttcagtatcagtagtggtcaagctatcagaacactggctctcctcacatggaatgccaaagtattccgaaaccatccagtggtcttcatttacaatttttggatctgggaattcaattttgtccaaatctctggccagtgactcacatgattctgagtccttctcggtgccatttgcggccaactcagtaggcattgcagaaatagccataacatcaggtgaagcaccgatataagcaagagacaatttaacaaaaccagctggggaatgaaataaatcagttgaagaaagagagaactctttctcaagttttccatccttcaccagtacttcagacaaaggcaccaaagcaaaaccaagcaactgatcttcaagataattcttcaccctgctcagcatccaaatttcacatttgacagcagaatcaacagtcctaacgcttagacgaagattctcattgaagacagggttccttcctcctccattgacagtcttggtagagacagtattctcaggattactagtcaagcaaatcttagcataaacatcttgcttgtggtatatgcagatgttatgaatgtccctggcctgatgaatgtaaacatcaacaacaccgatggattcctccggattaacctcggcagcttcccttccattgacttcaatgtccttagacaaaggacccgagctttgtgtgaaaacatcagacctatacttctcagcttcacccaagacagagctcttgaatggtgacacaacagattgtggggattccatgatatcacagtgattgggaacctgacaaagcaaaaaaaccttcaacaaattcaagtcactctatgttaagctaagcttcaaaccaacatcacaaatgattttttgaacttaaacccaaacttcaaacaggaacaaggaacaggaagaactcaaaattcactattccaagaccaaaactgctaaaactcagcttgaaaatacttccttacaatttgcagcccaggaaggattaagcacatccaaaacagatagaaagtttctagtatgtgaattgtgaagtacaaaaaaatagaaaaaggaagaaaaaggaaaggcaacactcaatccccaaatgtgaaagagaagtgggaagcttcaatctgaatttctcctaagggctgtcacgtgagttgtcaactaacaggaaggaaggcaattcagaaacaacaactccagttcataccttaactttatagctaagagcagagaaacacggaattgaggatcaaggtccacaaaacccaagtagagtgaaacgaattcccaggaaccagaacctcagcttcaaaattgaaacttttcactttctagagaaatactaagatgcccagaaccggctaaaacttaaaagctatcaataagaataaagggtattgccagatttgaggagattctaataaagctactagcttttttttctgctgctctatgcagaaaaactaccagcggaatccaagggagggaaacagttaaagcaaaaatagaaacatacaagaattcagagagaaacaggaaacaaaaaaagaagagagactttgattaaaaacacagagatgattaagttgttgtggtttaacatacctgccttaggcccttagcctccaaagtcaaagcggaatgtgttatgtttgtggctctaatccagaatgaaggacacacaccgtgttggtgatgagaagagaaggaacaaaagcaaggtggcttgtttaaaaaagggaagggataatgtgaaaggaaaggaggaaatagtgtgaacagtgaagaaaataaaaatctagaggtgctgtagtgttgtgtgttggtctatgattttgttgtgtgtatttggagtatgtatgttgagagtatatatgagcaattaataaggtgctgtgcatacacagagggcactcatttattgcaattgttgtgtgtggggatagagagagagagagaggataaggtatggaaatggaaggggatgcagcagccccgcgcgaatggctgagacagaccaataagaagggagttgtgtgcattttgcagttggaggtggggtatgctgcttatgacttttctttgtactttttctgctccacacttctctttctgcccccacctacgactttgagtgagtgcatttctgtccttctagtgttttttattgtttttttttaaacaaattaaagtttaatggtgatgttggtaatgtataaataatataaaattattttatattattatttaattcttaaaaaattgttatcaaattataaattatcatttgtataatttttaagataatttaataaaatttaataaatttatcataaattataaattgtaatttaatgataattttacattgttacttattagtgtataatcttttttttcttaaaattatacatatatattttataaacagataattttgtttgaactatgtagtatttaagataattcttttttttttttacaaaactaatgaatataacttagttgataatatacattaagtttatgagagaaaatatgagaaagaacaaagaattttaaatatgattataagtttggattcgaggattaattctataatttgtccaaaaggtcaagcttgtagttgtgggatatcttagagtctcaagaaacaaaaactctaattagagagtacttaaaatatttatgtatcttgatgtatatgtccatgatatttcttttttgttgctttcacatgattatgaagaataatttataagataatagtttaattttcatcctttacaaaaaaaattcatgttataatttcggttatatccagtccttataaaaatgagttagtattaattttagctattataaaaaaattatttaatttgtgtccctttaaaatatgaaattagtgtttttcatctttataaaaacagtaaattttgattttggtttttgtttccttcatatatccttcctaaatgtgaaatcattgtttttttcttcataaatatcatttttagaggtaattttgtttgagacactaacaaacaataaaaaaaataatctctttaagtataaattcgaaccttgatttgtcagtttgtgaggatgagtctcttccgctgcactcaatcctcgttggtaagaaactattgttttaagttcttaatgtttattttaaaaaataacattatttgaagaattaaaaataatttagaaatgttacatgctgacatagtatcacagactagtaggtgtcacttggatattcacttaacctttttattttaaaataaataagtaaataatattattctaggtatctaaaaataattttagaagtgtcacatgttgacaaggtataccacacagtaggactcacttgaaagagttactttttatgaaacatatgagtagttgagaagtgaatcttactgtatagttgacaagtagttgaaagtttcacatgttctcgatcggagcactcaggacctgagtttgccagggagatttcctactcttcatctcagtaagatttgaatttgatggctatatagatgaagacccttataatagaatttaccttgatgaacatgaacaatcaatcagtctcattatattgttgctcagccagtaggttcatgttattctgaaataccttaattacgtatactcgagtcttgggtttatagagttacaactacatatcaagaaataatcaattaaccctctttcttttcatgtataatcccataaagcaatttaacattgttggtgtttctctttctgtgtcatttttttatgtgaagaaaaatatgaagtcaaatttgatcatcaaaaatcctgtgcaggaatcctgtgcaggaaatgcattgatgttatgtgagtctagaacatgagagatttcctcgcatgataccatcggtcgcccacttatgagaagagcttttgcacttttgttctagaaatttgccctttttcttcattcgtgggtcccatggcatatgcttccccgacgtattttgcaactcttgcaccaaagttttacgtaaaaatcaaagattaatcatggtggggtcttctgctttgttcatcagctcaaaatgacttcttagaggtatcaacttaaaagaaaagaaaaatgacttggaggtagacaacaggggcgtcactagttcactattcaacaaccctcaattgtgtctttggaagagaagttaaatggcgtgaatacgtttttgtaaaacaatttcagagaaattatgttttgtcagtttgttacttatttcgtatttacttgttgaactttctttctcctacaataatttatcttgagcactatctatgaatatataaagcattcttaatagcatatatatatagcaactgaaaccatgatgtgttgataaggaatctgggtgttacgggtctcaaagtcccacattattgagtaatatggaatgttgggtgaagtatttaactgttagttctgttttttttttatatcaataaatatgttctttttatataaattaaggtatattaaagttggttatgttctctatggtgtggttgccaaaatgtcattaatttgatttttctatttataataaaataataatatttgaacatctcattattttgaccacactatctttatctcttattcttctctttttttccatcatactatcacttgtcctaacttgtaatggatataatattatttatcatacttatataagtgtaataaattatattatcttcatttttatttaaaagagagagaaaaaaccatgactccaaacatatattttatcaactaatttttaaaagaggatttcccaaatagtcagatcatcctctcttaaaagttagatgcttgtgatgttgatcttcttctaaagttgggtaatgtaatatagtataattttattggtgtaagaaattaccaattttttgtcaaactatcatagttaattatatctttcggaggactatatcgtctattattgtagaatatctcttgaaatttatcaaatatttcatccattataaatttttcagttctaaaataagatgtgacccaccactattaactactcgtgcccttcaccgattgaatattttcccttaatttcctaaatgtgacgcgtgtcgtgaaagaatcccaacccaagtcccctatcattattattattatttctatatattgttttttattaatagaaattaaagatattaccaaaatttacaacaactcatacatatttatttaactaagtgagtgagatccgtgacaatctgcatgctctttcttccccttttactttctcttttggatcggtaagaaaggatgtgcattggagtgctttcatgtgcctttctacttttgctcatcaaatacccttttttcatccttcacatatatagtcggtatatggatgccgtaatttgcgtacaaagctttcagatattagacaccgtaatgaaaattattgaccaataaagctagtataaatactaaattaatataatagattttaatatcttctttgaattttttggatttgaaggacatgtgggtaccatgtgagacttttgattgttgcaattcgctgttgcattgcatataagaacaaatggcatagtcaattattaacagtgagttgtaccatttcaagaaaaatgatataagcttctggaaagctaattacgtaattattaaactacgattactattgactcgtgatagaattgaaatgtatgtatggaggacgagcctctgatttccttcttttcttttttctttttcggtattttgagatgacaaaagatttgtatcaatgaattctaattcaattaattgaacatgacatataaattattataaaacttttgatatttatttttgattctcacatataaaaataaaaaatttgaggtgatgaaaaatttgaaggagattatcccattcaggatatatttggataaatattagaaactagttttatggattctaatgcataaaattaagaagaaaaaatattactgttttttgagtaaaaaaacttttttctcttaactaaaatttaaaaatgcacttaatggcagaagatatgctattaatttcggcgctaaccacatgattcttatcataaggaaattgttgacagtggaaactaaactcgagctttttaatttcaataattccaaactaatcatgttggcttgtgagttgaaaaaatagttatgccttgtacatttagttacataattttgcgtaattgcccaggtggattgatgctattgtgccaaataaaaggtaaaccctgaaaaagtgttggcaaatctcgacactgttatcgaaaaattgaaatcatatgtgttcatttcccattatcgttttcaatcaaactactcccatatcttttatatggataaaagataaatggatatccaaaactattagacacctaagtgtgagagaaaaatataaaaaaaaatgattccgtgattaaatatataacagtaggaaaataatactttgagaactaatatgatagtagacacatagtgagagtgataaaaaatgagaaaatataaatattataaataatataatatgataagaaaagagacagagaaaaataataaatattaaataaatgttttaaaaagaaaaatatcattgttcataatgataaaactttcagttatgtgagctagctcataatcttagtaaaaaaaaattactagttttaatttcaagttggactaactttttcctcccagcccaaaacaccacagaaaaaaacgtttaatttaaagtttttgtctaaacttatctatggttttcctctattaaagtctaagtagagttgtgtgtgtgaaaatagagggagcacaagagtaatgcatgctgttgttataattaagtttaaagttgagtgtgtggataaagctagaaagcttaaggggctaagctggctttacatgcttgaatatcatgctggtctcaatgtggcaactggagcaatagtcatcacaaaatcattcacctaaagttaagtgcgtcaagagggatcacatgtacagtctgaattgtaagctcatgttatctgcaaatgccttaattatgtgagtgtggaagagaccaaaattaattaaatataatactcgtgtgttgctcaaatttatgttaatataaagattataatttaaaatattaaatatgtatttttttagtataggatactagattgtggacaaagtttgtagtataacattatatttttattaaatttaaaatattaacaaatactatacattaaattgataattatattacttaattgatattttaatttattataataaagatttttaaaagttattacaattcagaatttaaaatacatatttaattagaataaatattgattatatattcctaccaatttttatggataatttttctttggaatgtgaataaaactgaaaaatagaagagagaaaaaaatcacatgtagaataaatataatgacaattttttatttgattgaattaattttaaattattaaagtgatagttaatgtaatttattataataaatttggattgtaaaaagatatataataaatttagaaattaaatatattcaatacatcaatattatcaatcaaacactaatttattaacatcaatatattgaataattaatttattagcataaatatgttatattaatgttagttaattacatttaattattaattatatttattagaattaaaaataaaataattttattgaatattttttaagaaaataaatataagtttgtcacattatgacatacagcaaaatcttctttttatggtagatttaatattgacctatttagatacttacaccctttacatgaataggttagagtaataattttcctgacatatctggccctttctcatctcgtcctaataaatattaatattacggaattcttctttcaattgcagccaaattgtataattgagatgttttacccttataatatccagagagaaaaaagaagaagaaaaacataggaatataaaaatcatagtcacaacaaaagctcaatttaaattaaatgttttttttttctttgtttgaagccattatttgtctttaggaaagaagaaaggataatttggtcatttcattggctattatccttcttccaacggtcatctaaacctcctcaattcaaaaacttgcttctcttctctgtcttcactctatcgacgtttgaatccaaaactctcattctttctgtgtttatcactctctctctctctctctctctctctctctctctctctctctctctctctgtgtatagcttcattgctaaattgtttgcttgctcagcgaaaccataaccatgagacaaagcagtaacttagaaactgcagagactcgtttctctggcaccatttcatcctcatccctcaaaaaatttcttcccagatcactctcttccaaacacaaaaccatttcaaaccctaaaatcccaaattcagatgcagagaacactccccccaccgatcccaacatccagatcaaccatgaacaatcgttgccttccacaaccaaacaatcacagtccaaaacctcaatttctcagaacaacctcaaaaaatcgaaattccctcttgaatccgacccatcagtcaaggtaatcgccaatttttctctctttttgggcttatttttttgaacattgaagttgttatctgtgagtctgaagatgggtatgacgtatgtgaaaaaatttctgctgcttatttgcttatactatggttctgaaacaggttgtagtacggatcagacctacgaataacaatggaatagagggagatcgaactgttaagaaggtttcttctgacacattgtgtgttggggataggcaatttacctttgattcagtttttgattcgaacaccaatcaggtaaataacttcacttcattgtgctatttgtgatttatgttctttatctttcaataattttccatgataggattaaggtaatttacttactatttatatgacttgcttttataaatgaaacaactagtatttttttaactttaaataattttctctgataggattatgatacttactatttatatgacttgctcacttgctttggtgaatgaagcaactaatagttcattttatttgcttccatgctgttaagagaagataagtgtgatttatataagctgttgtttgttcaggaagatatttttcagtcagttggtgtccctttggttaagaatgctttagctggttacaacacttcaattctgtcatatggccaggtacttcttgatgtttgctatattattttaaccttttagtgagagaaaaaaatggcattcttgttcgacaattaattgttggggattttttttatttttcttttaattctttgctagtctggaagtggaaaaacttatacaatgtggggtcccccaagtgccatgtttgaggagccctcgcccaaaagtcacaagggaattgttcctcggatcttccaaatgttgttttctgagctggagagagtacgttttacttcctgctttaaccactaaatctattttctattatgtttttgattattttttatttttatttttcaattactatattaggagcagcatgtgtctgacgggaaacaattcaactaccaatgtcgatgttctttccttgaggtaattctttataaaacttcccattttggcttccttgtttgtatgatgatgatcttgtttctttttcatttgttgtttgaaacagatatacaacgaacaaattggggatttacttgatccaacccagcggaaccttgaggcacgcatatgccatccttttgtgctacaatttatcataaaagactaatacactagttttcgattgctgcatgcttattatggctggtctaaattattgcagatgaaagatgattccaaaaatgcattgtatatagagaatctgaccgaggaatatgtcactagctatgatgatgtaacacaaattctgattaaggtagggactacggaagcatcaaaggaaatataatatattgttgaatattatatgtctacatactatttatactttatcagcttagctaatttggtctttatatgctgcagggcctttcaagcagaaaagttggaacaacaagcttaaattctaagagctctagatcacatataattttcacttttgtgattgaatcttggtgtaaggtattgcccactataattgtatttaaagtgactagctatggaagactaacatcttttttttcttttttcttttttttttcttatttaagattgacacagatttatattgttaattttctcttagttaatcgctacttctggttttttttgactggtgctgcagggaatatcatcaaatggtttcagtagttcaaaatctagcagaattagcctcattgatcttgctggacaggacagaaacaaagttgaggatgcaggcaagcaatgtctaagggaagacaagaatgtaaagaagtccttatctcagcttgggtaagatgccatgtcatgactagatacaaatgtctaaagttggtagtttttcagttatccaaatatttattaaaattgtcctggcaacacatacgtggcttctcttgatttccattcctgcctcatgccatttactattttttatttgttatttgtgattttaaccgtttattgcatttttttgtctcttccgagcaaaatgcacaggaccgcatctagtgttggttgaaagcaatatcttggtcttatttatttatttaatgggtgaagttatcccgtccttattttacttctttgtaaccactattttatttcactgctgtaggcacttggtagaagccctgactaaagaaactcactcagaaaaagcagaagaaatttcaaacaggaattcctgtttaactcgtttactacaagaatcactcggtggaaatgccaaactctcattaatctgttccatctcccctgataacaagtatttacctggaccgaggagcattacctattcatgtgtatgccagacatcttatattttgtttctagtggtaaagattgtatttgttgattgtaggaataatggtgaaacgctgcgcactctcaggtttggacagcgagtaagaaccattagaaatgaacctgttatcaatgaaataaaggaggaggatgttaatgatttaagtgatcaaatccggaaactgaaggtattatttatcttcaggacttcactgacatagtttttaatgggttgatacagatctgacatcacagaattatgtgtttgctttggcgcaggaagaacttattagagcaaaggctgaagttcatagctcagatgggagtaaaaatggaaacctccaagtacgcaatgtacgggacagccttaatcagttgcgagtcagcttaaaccgctctctactcctaccctgcattgataatgacactgatgaagaggtaaatgtggacgaggaagacataaggaaattacgccagcagattgatgaattgtatcattcgtgtgaagagaaccctaaaaacatatctgtcagtgaagattgtgtccagtattattctgttgcggaaaattgtgacacagatatgaccagtggtgatgaaattgaaaaagaggaagtatgttatggagaagcaatgagtaagctatgtcccgaggaaactgagggatcaactaccaccttggatgcatcagcagatgactttgcatgcacagctaatgcctcaaggacaattaaatctacattcagagatagcatttcagttagctcatgtagtcggtctccaatacttggagaaccacagttgtctgagtctccaaaaatcaagaatgtccagaggaaaagtgtggcttattcaccaagttgtcttggaagttggaacaatgtggcagaggagaatatgagttccagtaatgatatattaaggcaatcatttaaagagggtgagcagatgcgatcgtcactacgttccagcaaggtttttcaaggtcctaccgactccttggcagcaagcctacagaggggattgcagataattgattatcaccagcgaaactcagcattaaacaaatcttcaacttccttctcttttgagtgcttaaccttgacaccttgtccagaagacaaggatgattcttgtgatcaaataatgcaacagaagaaatattctgtcgatgaaagaactgctagcttgctttgcgaatcttgccttaaaagaatatacgatcaggattctactgaggttcaagatagcataaagtcaagagttgaaacagctgaagcagagaatccggatggactgacagataaggttccaaaagtatgtcttatagacgatttccagaaagttctgtgattaattttcttgtaaaactgatttatctttgttttttatgcttaaaggatttacagagtataatggataaagcaatctcgagagaaaaggaactagagaaagtttgcaagaagcaagctgctagaattgaagaactaaatcaattggtataaggagtcatgccctcgtgaattatctgtggtgtgaattttacattactgacaatttagtttggtttgtccaggtggagaaattgaaaggagaaatggaagtaaaatcttccatcattgtgtatgatccagaaagcaataaactgactagggatgaagaagagtataactcattgaaagatgaagacaaggtcaactgttggttttgtaatttaacaatataaagtcctatccattggaatgtttggaactcgcccttttaacgtaccttttatgttgtttgcagcttccaaggggaacttccttagacaggcatttaccaggtattatagaggaaaattgtgaaattaaagaagtccaggaagacgtaaatcaaagagacagctctttcgatgcagctgagaaggaagaacttcttaaggagattcagaatctaagaagcaggatgcaattatgtagtgatgcaccagttaaaaagtccaccgacaaactaagatcatccttatcattaatgtcaagatccattcaactccgaaaaagtggtgtatttgctcttgataatggtggagatgagctagagaaagagagggagagatggacagaaatggaaagtgagtggatttgtcttacggatgaactaagagttgatcttgagtccattcgtcagagggcagagagggtagagatggaactgagtttagagaagaagtgcactgaagagttagacgatgcactaaaaagagcggttctcggacatggtagaatggtggaacactatgccgacctccaagaaaaatataatgatttggctgcaaagcacaatgctataatggaaggcatagcagaggtgaagaaagcagcggcaaaggctggaaaaaggggacatgctcgctttgccaaatctcttgctgctgagctttctgcattgagggtggagagagaaagggaagcaaaattcttgaaaaaggagaacatgaatctcaagattcaacttagagaaactgcagaagctgttcatgctgctggagaactacttgtcagactaagagaagctgagcatgcagcgtctgttgcagaggtaaaaatcccatcaattttttcaaatgcatttgataaatgaactaacttggtgggggtgcattactttatgcttaacgcaaccctccctaaaatcaatagatattagataggacttgtggaaaacgattttgtgatgatccatttcggacaattctaattttctcttgattttcatatttcttatacaggagaatttcagaaaagtgcaacaagatgatgaaaagctaaaaaagcaaatggataagctgaaaagaaaacacaagatggagattgttaccatgaaacagtaccttgcagagagcaaattaccagagtctgcactgcagccactatatagagaggattctgatgatgttcacaaggatgcaacttcccatgatgatcaggcatggagagtagagtttggagcaatctatcaacagcattattaattcgacattagttggattgattaacaattgatgagtttaacaatcaaacttccaaaagtttgtctagcatcagaagatccttcttggatcaatacaccccatttatattctctgtgttgttttaaaattcattctattttttaagctgtgtgtgttgttttaaaattcattctattttttaagctgtgggagcacttggtttttggagttcgaattcttttctgtttgtactgacagtaggtaaaagtaataacatcgaattatttgttctttaccgcttgagttttgctggcaaatacagaagctacagatttttttatgaattatttgaggaaatattgtttagaacggatagtcggatacaaacacaactcacacaaatctgtacccaaaaaccaaggcaactcacaaatatggtgtactttaaaatattgtgaaggctatattaagttaaggatataaaaaaaatactgtattaattgtttttgttatattgagaatgagtatattttaggcaagggaatgaagttttttcatgataattagttttatattttaaataattaattgctaaagataaaatgggaaaataaaagtttttggaaaaataattcaatagctttcagtcgtaagtaaaatttttatttataataaaaacttttgaaacacgggagaaaaaaagtttttcatattaatctcgtttaaatacactttatttataaataaaaataatctcaaaagcaggaaaaacttcttaatattatatatttaaaaattattcatgtcttctttctgttattaatgaagagacttattcgatataaattattcatttaatatctaaatatttttaaataattagttgatgacagttattatgtcaagctttcaattccagacataggatttcacaaatatcctttcaaacaatttgaattggtattttcagtacatttaaaaatagaaaaaaagaagaagctctaagcgataatatgttgtgctctctcgatctcaaaataataattgttctaggttatgtttatataaattaaaataataataaataaataaaaataataaaaatatataaaattaatcttatcatcattaatttattttatatattttgttgttcgtcattaattataaagaataaaataaaaaactaatatatatatattaaaataaaataataattatttttaaataatttttttctgatgataagtataatataacggagggagcatttgattaaaataacttaatttttaaatatttttatctcaaaatgtacgttatggttaaaacttaaaaagagtgaaaaaggtggaagggaatagaacagcgtcgtggaggatgttgcaaagggataacatcactcactcactcgcacacaatagaatcaaaaagagaaaacccaaagaggcagaagacacagaagagaggttcaacgtcttcatcatctatggcgacgccgaattctgacgcaacctctcagactcaagattccgacactgttcccgattccaattctcccaacgccctcgtccccgccgctcccgccgtttgcctcctccgctttgccacagactccgccggcggcgctctcatgggctccatctttggatacggttcttctcttctcttctctcctctccgtattatcgcattacgccgtcgtttcatagactaattaccgtttaagcctaatttcttcgttcaactatttagtcgaagatttactgtttctgtcgatagtatgttaagaattcagtgcttgaattcttcttcgaagatttactgattttgcttgaggatgcatgttatggtgtgtttcaggtgctggattgtttaagaagaaaggttttaaaggatcctttgtagaagcagggtcttatgcaaaggtacattgagaatctcgctgcctttttttcctgcttgttttacattggatacttggttcatatgtaattttttttgtgcttcaattgagcttgcaattaattatgttgttctttttgtcattagacatttgcagttttgtctggagttcatagtttggttgtttgcatcttgaaaagacttagaggaaaagatgatggtatgaatatttaattataaaatgtgtcacttttgctttttagtgaagctctggtaatgtgaattcttttgcatctacagtcattaatgcgggtgtagctggatgttgcactggtcttgctctaagttttccaggtatcttttatttatttatttaaataaattgataagtttgtcctttctttgaaccttgtaagaaaaaattaggataaaggacttgtcaatctgactattctgaatatgcaaagaaaaaattaggataaaggactttttaagaaaaaaaaactacttaccccatcgtccagatgctccttactatatagaaggtaaggaagagggatattgtacgcaatcttattcttgcatatgcaaagaggttgtttccagattcgaactcatgatcaacaagtcaccaagacacaacttgactgttatgtcagggcttgtcctcccccaaaccatcacctaatatggagaggaggggggaaatttgctgatgcagaatgccttccaataattgctattgttaaaattcaattcattgtttagctaaatacacgtgtaaatttcattttgtatactttttgttatcaggacttatattctaggattttacaggtgcaccacaagctcttatgcagagctgtctcacttttggggcattttcttttatcatagaaggactaaacaagcagcaaccagcacttgctgttcccacatcctggaaaaaacctgtgcaacacaatgcacgttcgcctttggtactgccccttcaactctctcttccagatgaactaaaagatgcgttctcctttttctccgattctttgaagaagcgcagcaagggaccttatcctacatctcgataagagattggggtatcgtgattttctagcatcatgtagataagatgtgcactctttgccttttatttttgtaggtttcttgtagcggttatcaacatttcttttttgatgaacttaagggtgacaacaaattgtcgaaggacatgattatttacatgttcgtggtttgttgaacttggattatgatgactgatttaggttgacccgtgcacttactaatataataactgttagtattaggtgacagcgatatttgtttgaaagttaaactctgcaattttggaatttttctggttatacatgttacatttacaaatttatgatttttaattagaaaattatgtttctgatcttggttggaaatatacttcaaaagcatataagcacctagtccttacttgaatatccatttattctaacaacagcacatatcttatcaaacttggtacaaatgcaacttgattacgtgattgaaatgtagataactgaaatctaattaatagtgtcaactacatactacatatactcaagttgttagcctttcaaatgaccaccacaaaaataaacaaagctaagttattttaatagtgatgtttgttatcaatgacaatttcacgttcaggtaagtatctgtggtccatagaagacggaatctgtcgcggcggcatatgtttgcggtggcatccccacccatagacggaagctctttagttgattcctttgtaaaatctaatttgtcacttagctgcaaataaataaccactcaaattgattcctttgtaaaatctaatttgtcacttagctgcaattaaataaccactcaagttgattcctttataaaatctaactttgtcactaaatacttataaaaaatttctattaacttattttatgttggtcttcaattctcttttattccatctcttaatataagaattatgtatccgagctattatctaattttaacattgctatgtggtaaatttaagtttgttttcacttaaaaaaaattgggtttgtttagaaaaagatttttatatacatttataggaaaataaaataagaaagaaaaaaaaaaactttttctaaactaatttgtaaaagttttcatattagttttttcaatttttttaactttcctctttttagtgttaaggtgtgtttgtattcattttaaaccaggttgaatgtgaatccaatatgagaggaggattcaatgtgtttcaagaagtttttttttttttttttctttctaaataacaatcctatttaagttaaacagttgacaaaaactttcatttaaagtaatatgcattaaaacaaacacattattagataaatacatgttcctacatgaataatttataatcgaaaatttaaaactctacattaatgttccctcttcataattggtcatagttattttataaatactactttacttttaaaacattatgtgacattagtcgttcttatttaactaagctacaaggtgtcgaatttaagtaaattcactcttaaattattttataattaatataaaaacttacaaattattttatttattattaatgattaaaacttcatagtttaacatattataaatacatgataaaatatttacaatgaataatattttaatagataatacaatataatcaataacacaaacaagtgagtgcatagattatttgatacttatctctaggttgacattaaatatatggtaaagaaaattatgtaatccttgataattttatttacgtcaatccgaataaaacatggcgtttatgtttggattggtgaggagtaccatcgcatgcagttgacaatcaaagagcattttcttcagaagagcagaaatcaacttattttttctgcaatgaagtctgatgttagctattagagagggttaagcttctttcgtagaaatgtatatcaagcaaatatggttgctgcagttcacgcatatcttttggttgctgtatgcataatattatcatgcaggggttgggagatattgattcattttttttatcatgatatcactggtttgtttcatgggtagggatgtttgtttgtttgtaaacttttggccaagttgtccacatcttgtgaggctgggagttataattagtcagtttacttttgcagtttttaccaaattatcaagtttattttgtaaggagacaaacgaattttacagcttattacctagttagggcagcaaattcgtatgttgatttaccaatggttgttgctgaatagatccatttggaaataatataaatatcttttcataaaataaataaattaaatgtaatatcgttttcacttcctaaaactgagcatagtaatcaacaacttgagcctcatttttttttcctaataatgcaactttatttatttaacattaaattacatgaacatatatcaaatttaaataattaaaatgtccgtaagttttaatcgtgatagtatatggatagagaaaatataaattataataccaggggtacttatcaaattaattccacaagcttgttctgtattagtcacttaatggatcaattatatagaaaaaagatttttttttcgttaacaatcacctcaaatcattattaataaaagggtaatatagttgtaaaacttttttatacctaaaataaaaggtactttatgtcatactcggcaggtaatttgtaatttcatggaaagtcatgtaaatgaggttgatggtttgttcactttgttctatccataagattagaaaaacttttattcaacttttttttttttatgtcaattcacctatttttatttttcaaatggacccttgtcttttctaaacatgttttttgatatatgtcttttctaaacattaatatatataataatggaaatagtaatatgtatttttataaactctatgatttagtaaaatcttacgcttacttaattaaataagagtgagacatgaaattttatcgtgaaagttttaaaaaatgttaattatcaaagaatatgttggtattattcctttcctagcgctactctttcgatttactaaaatggaaatgaatggttagataaggtataagaataaaaaggtttttattaacacctgtggatttaaatggcaagaaatttggtttatcttgagtaacgtgtcaggtttttttaaaggattataacgagaagtttaaaaacaataaaaaaaaaaaagaagtaaaaataacaagtttaactaactagaattttaactctgcttttaacttactacatctggattttaatttacgcatacatataatattgacataaatataaaggtaaaagggatagaaactcttcgcctaattcatacattccaatatacatcagaacttattttgcttcccatctttcccaaatcaaccaacaaatgtgacattaaataaaatcaataatcaaggctaattgcactttcagacctccaatgtctagctttctcaaatccgttggtatagttctcaaaatcatcaattgtttggtcaatctcttcctgagtattcatcacaaaaggtccaaattgcaccacaggttcacccaatggttcacctccaaccaaaatgaacctaaggaccttagaagatttgttccatgcctctaggccatccccaggaccaagaagaagtatatggtgagaggttacaagttgagacttttggtttccaaatacaccctctccttccaatatgtacacaaaagcattccaagactttggtataagttgttgcaagtgagcaccaggtttaagagtaaaatccaagtacatggttggtgtccttgtgtagattggagactttattccaagagcttcccctgctataactctaactttgataccatctatcatagtttcagctatgtccttgctcaacatttcttggtaccttggctcaatcctataagataatagtacaaagacatattaaaccaaagttttagagtctaaatgaagaaactactttaccaatttaacgtaaacttcaaggtagacaataaatgcttcttaaaggataacaaataatacttccaagaagacactaatggaaaagttgaattcatttttagtggggcatccataaccagacaaattttgaactagcattggcaacatgttattattgctcttattattgaagcttccaccatcactataggatatatggggtgagaggcacattctttatgctggccatttaagtcccttttgcacacttgcatcttttgatgccctatttaagagcacttctaggaaatggtacatgatggcgaatcatgaggaaaaagtcacatgtgaaagtaaggaaggcatatcttaattcagaaagttttaaaagatttgactgtttctttgtaaagagtgaagttcctttcggtctcgttgatatttggtgatgaggattatccaaaattatcccccaaaccaatgatgatgatgatcttcaatgacgcagaaagtacgtcatctaatatggctaagattgcgatttgagtatttcataaaaaaataactcttggtcactcttatttggagctttttacattaaaaaattaaattctaggtataaatgaattacaggatatctataaaaaaattatttaatctatatttagttttgtgtccactccaaaagtgcgtcatcctgaagcaaaaaatagtaacttttgtgtttttttcattcatttgaaatgattttgttgataaacatatatatatatatatatatatatatatatatatatatatttgatgcttatccaaatacacttacaaaaaagacttatgaccttttgtaagttcaacaagtacttaattaagttgtttaatatttatgaatttttgtaagggcaataagtatttaattaagttgtttgttgataagtgtctctaacattggtacagaagaattgtccacttacattttatgttttgaagcaagattgatccacagctgaagacccttttgggttccttgagctgcaggcatttctgagtgaactatccctctccctgcagtcatccattgcaagtcaccagcttcaattgttcccttatgtccttcaaaatcttcatgcgttacagctccctaaattgcgcaaaaaagttgcattcaggtgaggctagcacatcagcacaagcatatgtgaccaatatatcacgtacacaactttagatacattacattacactcaagtggtagttggcattctagaaaagcaaacaagatatcaacatgtggggtcactcttgtgtttgtgcttataaccaactactatttgcaatcaggacacaatcttaaatggtatggttttagtggtcctaatcttaattggtaacgaatcatcaatttgtgacttacatgttgccacaccaccagcacaaagattaacaccatattgagctgatacttagctcaattaaaactatgagctaatatagaataaagaaatcataaagcgaaatagtatttagtttacttttaatttttcgtttttcaattttgttgatttgcataatggccattatattatatgcctttgactttataacacggattggaacaaaaaatgaaataactcaaaacgtggtttctctaatgttggaaaacagttttatattataatcaatgatcaaaggaggaaaagcccatgaactaaaacaataaatatttgctctacctgcaacatgtatgtgaccgtctcaaatcctgttgaaaataaaaaccaccacaaggaagaaacaagtcagaaactaagcaaatcagatcattgaagaacataaatgacacagaagattcaattggcaaacctctatgtggatgatcaggaaacccagcaggagcagtcactgcaatatttcataatttcacattcttagaatacaatacaagattgaccatcatactttttcataatccaaattaaaaaaaacagaggaaaatacagagatgcccacctgagaattcatccaaggcaaggaaaggatcaaagtacttgagttcaaatctgaacatatatacccacaaaaccaatcaattcaaaaagctcaacttttaaacaacttgcaatactatacacatataaagttaatctacacctttcaaccttaggatccaaattaatcttagttaaatataatcataactatgcataatggctaaggctaagattaactgtgttatcgttgatctctctttaagtcttacctccctatgcttcttctaacaacggctccaacaccctcatgctgaggtctggccaagaactttctggctacaagacaaggttcattaatgcaactgcaaatagcttggtccggcattttatgaaagaagtgcaaaagagaaagaaagaaaaaagtttatggaatgatggaaatgtgaggagcaagacaaagattgttgaaggtatatataggaaagtggggggtgtggcgtgagaaagagaggaagaggttcactcttggaaagtcaaactcaaaacgttgaggtcatagcatagaatagaataagagtttgcttgagctgaaggttctttttctttccttgttcctatgaacgtcagcataacgcactcatgatgtgtgatgtagtgtgctatgtttcataggaataggcataggacttaggaattttttgaattcatatagtatgatatagtatcttacttgttacatgattaccacctgtcatgttgaattgtgtgattttctcttcaaatcaaatttaaggctcataaatatcatataaaggcagaagagaaagagaaaaaaaatcttgggtcctagatggatttgtgcctctgcatcatcacttgacaattgacatcacccacgtttcacaatcggttaattaaagtcttgacttgtttttaacaaccttcgcacttcatcattttgttctactttacaattttcggggaaatgggtatggcctcttttgtttgtctatttactctttcttataattttttaattaaatttaaatggttcaaaagttgagtacttttttctttttcttttttttttctttttagttttattctttgtcctatactcggtgtcaaagtattaaaaatattcttttcgaatctctttgttccattatagatgaggttaaggttaagtttgaaagaaacaaataggtaaattagttgaactacgcataaacacttaataataacaaaaagaaattatgagttaaatttaattctcaaaatgaaaattcttcattcaaaaataaaaatggaaatatcattagttgatttaataattaagcttctattaattataaataaatatgttgaactttggagcataaatttaatttaataatatttcatatcatttatactaaacaatatctggagcatttcaaatgattcgattatacttaaaatgtgatttgagaataataatttttttaacgcgaggcgtggcttttatcatataaatatattttaaaaaaactgcttaaccatatttacagaaaaaaaatataatcgtaactaatatgaaataattttaattataattttaatttctgatgtatcattgttctatatgtagtacaaaaaatgatgcaaaaagttacttgtgtggttaaaaaggttctcaaatcaaattaatccccatgtgaaaaaaaaggttgatttatgactaaaaatgcaagacgaagtaaagtgagatatgggtcaagaaatagtggtccaaagcgtgtttggtgtaggcgattacatagagaaccatctttaaggagacacaagatagtatataaaactttaattattagtatatataattatcgaaataaaaatttatataattaaatttttaattaatagttttcaaaaaataataataatagaatgatagaagataatatgacaagtgtatatgtgtatatatatatattataatatctatacgttttagaatatattatactcctattttagaatatatttttttcctctttcttctcattctctcttaaattttttttggagtcaataatcaaatataagcagggttacgaggtgtgaaaactacaaccttcaagctcaaggctgagaataaagaagagatcgatcaagataagaagtatagagggaaaataacatgtttatatgctcaatggttttatgctaaataacaacaatatgacagtgaacaaaactataatttatatcacaattgatgattacaaaatattttatatcaatcgattaaaaaatattttatatcagtcgattaaaaaaaaaattcagtttactacattaatctcttatatttcaaacaacaataagtttcatggttatcttcataatcaaattaaaatctagtactttaaaattttggaacaaattgagtttaagttgaaggcttaaaatagcaatcaggtgccattgtttcatacattatatatttaattattagagactccttgtttgttttatagattataatttgtttttttttatacttgatgtttaatgttcaaaacatgttttttttcttccacaaaaaacatgttgcttagaaacaactttttggtcatttaataaaacggaaaagaaagaaagaaattgctattcatactgaatcttaaaatgtttctcttcataattgtttttttctaacattatacaatttctatttagaattatgcatatctagataatttagactttaaagttgaaaatttagagaataaacaactaaataggaatgatgaagaaaaatatattttggttggaaacaatttaaatggagacgatcattataatgaatttaaatattttgatgacgtgagtcttaaaaaaatgaattctttcttcttctttttttatgaaacctagccagcatatattattggacatttttttttttacctaagaacatgaaataatcttataagtaacttacgagattaatcactaaaaatggtctaagaaaatacatcaattgtgaatgatcttaaggatattaaaagaaaaatgcgcatgattttaaataattacgtgacctctaactaataattttagtcaaatgagaaatttttttattatgagaaataagaactacaaatacaaatcactaaataatatttgaatagtcaaaatattcaaaaaagtaaatggtttttttaaatggtcatgtaaccgctaactaacatataatcgatcctaattaaataagaattcttgttattgtgagaaataaaaattacaaatataagtcaatagatcatattagaataatcaatagtaaaagaaaaatacacatatttttttatgtgtttattgaagtctgaatcatctatataattgtatgaactagatttagagtttttatttcttacaataagaaaagtattttaacttatacattacacatgataaatttttatttttatatagttaaaatttatagttaataaatattttttaatatataaatcgtattataaataaaattataataaacaaatcttttgaatatattaaccatatcttggatttagatgaatgttaaacggtcgacaagcacatcgaattatccaagtaataaataaatggtaagtctgagtgtcgaattccacaatgattttgcttgtattcagagttaatatatttttaattttaagcgaacacaaattaagtttgataatttctaatcctaatgcggaaatgtaaaattcaacataaataaagataattaagcataacacaataaagagatagaatacaaacacttgagattgaaatgtcaggtaatgcggaggattatgacgtgttggggctcaactcaccaaaactacctttgatgcaatattacaaatatttctctgtttaattattaaaattgctcaccatcatctactaatgtgttataaccttaattcctcaagtgttaggtcctaaattacctaatttcactcctgatccctcaacaagttccatcaaataatttgcattaagagtaaagatgcaaaatgtaacataggctaaacaaaaccactttatccctagacatgatattatttagaaatgtttttcagttctcattttccaatgcattaaaatcctataacaagcttgcaaataggagattaaaccacaatcatgaataaagctcagaaaaactacaatgatacgaaaataacattaaatagatagttagaatcattacatcaagagtgtttggttgttggaaccccaacaatggatgggttagcctcccatttccatgagagggtttacaaatacaaaagaaagcaagaagaatgaaagataatagaagaaaatggatgaagaggtccccaaatgagtgagatttctaccttcactcgtgccctagctctatctctggccctccaaaagtccagatcctttgcctcgtgcccttatttttccttttaacagcaacccaaagtcgtggtctgtgctcagtgcggaaaggtcgcgctgagcacgccttcattgtccagctgaataagtgaccacgcgctaagcaagctggtcgcgctgaccgggcctgtcgcactgagcgagcatctggcgcacttaacgagtagcttcagacccttaattgtcctttcattttcttgcagtgaaatttctacaaaaacacaatcaacaacttatgaatcaactaaacttaacatctacttgataaaagtttaggagaagttaatttctatattttaatcacaaaaagaagtcataaaagaatgaaaaaaaggataatttacttatagatttacattcgatcagcaattatcaatgaataatttaaaattgatataattaaggttacgtttaactatacacacatgtaatgacatattaagccacatatcaatctcttttttataggaattgtaaactgagaacataggtataggccaaattaaaaatgacatcacatatcatgaatggagaacaataggatggcctgaatgaagaactatttcacatgtaattaaggacatttaaaagctattttttgttgaaaacaagtgtcttgtacaaggataaaagttaaaatttagcctaataaatatgaatagaaaaaatataatttgaaacgtatatataaaattttattttaaaattattaaagaaaaaattaaaataataatcataaaaaaagcttaaatacctttatagtccttataatttaatttttttatccatgtaaatttttttatattttatttttagctcttgcgaattatgtttattttatttttcatctttacaacactttagatatcacttttttcattatccaaagtattatctaaagttatttaatgattaaaaataaaacaaacataatttataaggactaaaatcataaaaataattttataaggatgcaaaacaaaaaaatattaaattagaaagattaaaaagattttttaaatgaaaaaatatggataatctcatccatattttgtttctgaattaaaaaaaaattccaaacatttagcaaaacacattaagaggaaaaaagagtacatgtaatcacgttgagatgtctaaatattatataactttgttaatgctggtacttatttagaaaacacatatttatggattatatttggatttttctttgaaaaactcatcaaattaagttttaagcaaaaaaaaaaatactttttgttacttttgttcaaattatgatcttggaagatttaagtggaaaaaaaatcgattatacgttgagtatgtaaaacagttttattttaacacatcatcacaattataactcactattaagtttattgtcttttattataattattttaaaaatcatagtttgtggtaaaggattccacagataaacttgattattagcgagattttaaacatcattctcgctttataaaccaaatcactgaatttgtacacgcaattatcacttgttagagggatgtttgtgttgtgctattggcatagacaccattattgtggcataagcatgataacaaatactaatgtttgagtcatatctttcatcatcaaccgctcagcacctcatgtgggaggaattaatcaacacgttgaaaaatgggttttatgaaaaatacggtaactatacgaaattcgatgaaaaaccccagtcatcttcaattatgcttccattccatccaaggtaagtacaacaaaataaagaaaaagagggggaaaaaaatgttgaataaagtgatcacttgatcgcggcgtgcgtgtattgttcatgatgacaaacacggtctaagactaaatcccacagtctacactctacacgcaaataagggtttattccaatgttaactatgcaaattaaaagagttttaatttgttcaaaaactcaattattttgggaggtatgttcccactgaatcaattagcctagctattattcaccgacgacttttctttttctctttatttttcttgggtaaattctttaatctcagtttgtatttaatcatttgttaatataatcattcaatgatacattgacactttattgaaacaattaaacttgctaaagaattgttgtgatagttaaaaaaagttcctccgcataaaatacctgtagtctgaaaagaattagtattatctgttttctttgcatctccttggaatcttcagattgcatttattagttgaaatttgaaacttgtttctttcttcttctttatgtggcagtggcaccagccgtgacaaactggtaagcaatgttgggtgcgagaaaaatgacatcattagaacaaaagcatgacgcgtcccataatcgaactcataaattcaaaaatgccatggactagtaaagtccacattctgatgagtaattgagaaggaaaaaaagttatacaataaagtaaaaagagaaaaatgtaatagtaaaatctctcaaggcagaaaactgcaaaagaggaaagtgtatctgttaatataagaagaaatggttaatgtaatatttgcatctatcaaaaaatgatagtgtaaacaatattttggtaataaaaaatcataatgaaaattaatagaactttaaaagaaaatttttaaatgaaataaaatatcataaacttgaagttgtaaaatatatattaacataaaaaagaaagacaacaaaatatttatatctctcttaagtagagtttaatttattcaaataattgtatcttaatccattgcacataccattgaaatgggttatttacatatatttagtaagtatctagtgttaattatgcatgaaattagagtttgatgtctatgtattgataatgtaaaactgttttacacttcatttaatcataaatcaccatttgaattattttaaaaatcaacaaatttatcataaataattaattatgattaaataattgtgtaaaacattttacactaacaatacataactttttttttctcaattactcatcagaatataatatattttcatactttttcaaccaaatcccatatgtcatatattattaacattgttagtacatatctcaatttttcataatttttttataatatattttcagtcctaaatttttttctccactgaatgttatttttagcctttttatatattactaacaacgttttttttttataattctaataacaaatttagttacacattttatcactctcaaagcttttactttgcttgcaactccttaagaagagaaacaaccttaatgtgtagcaagaggtgaatggtaacttggtaaattaaaaatactttagtataattttaattaaaaatatattttaaaatattttaaagaatattctttaatgatattaagttaaatacactaaaattaaccccattaaacattatctagatatcatgttcttttcaaatccatacattatttataaaataatattaacaatatctttttaaaaataaatattaacaatatctgtaaccgttactaataaactttttatcaatagtagcagttaattatatcttttgatgcctgaaatattttttgcatatctcagcatgagctgagaataccccttggcagttggcacacgtatctgcaaaaattagactatattaaaatatctatataaaatgataagcacaagtattagctatcattatcatgattgccctactaggaatcagtcactagaagatatgaattatgaattatgaagcttgtgccaccaaaatcggaaagaaaacatctaacgtgataactgactatatgaattatgaagcttgtgccaccaaaatcatacccaactcaaattgaaagtgcaatttaggagtaatccacatactttatgtcttcttaattgggcatatatatgtttctcaaatccacaatagttcatataaaaggagaaacaatagtgaattattccacttgtttaccataacccaccatacttggccattattgcttccaatgctttgtcgaagcagggtttgtaataaggaacacaatgattattgctatggtaacaaagagatagcgtaatgacacccctcaaggagactcctaagtgggtgtaagatatgcaatcttcttagtttctagtttctgagtttattagtataatttaagagtctgtttggatgaagcaatttaaaattataaagaattttaaattttaagaatttcaaatgcttcaattgaaattctttcattttcaaaattctgtgttaggataataaaattaaatttcatcattttcaaaattttatatttggatgaagaaattaaattttcagcatcgttcaagatcgtgaacaagtgccgccacacgatatgctcaagattactctctctagcaccatctcaccgcctcatcccaccatcagattcaccctcaagagaggcaaatcaaataacgtaaaaatcctgaagtcttggtcgggtcggatatgggcacaaccctctacgaccaagactctgacaaaaaattctcttgcgccattgctgattgcggcttcggcaaagtatagtgcgttgggctgggtcaaacctccgacgacattggcagagttcactctcaatagtgccaatgggttggacttctacgacgtgagtttggtcgacggttacaaccttctaatgctgattatcgccaaggacagcaccaggtgcagcgccaccgattgtcttgcgacttcaacggcgggtgtccaatttcaatttcaatttcaatttcaatttctcactcttttagaaggaaattaaaatttcacatttttagttgtttaaaattatattttaaaatttaaaaaaaattaatttcttaaaaaaaaaattcaaataatgaattttagattattttcttttaattatctgaatttattttactcagttgaaattctctatctaaacggacttgagaaatctcaatagaaattggcacaattttaaatttactcattaatagcaactgcaattaatcgaaaagatgacgccaaaaaatcttctatggtagtgtagttagtgcctgttgaaatcacgaattcaaaatccagctaaagatccaccattttgtttagtattgtcaaatcggggaaaccgacccattttgtgccactcattgtgagtaaagtcaaatataatttgttaggtgcatgtatcgtttaccttaccgtacacatgttacaatttaacaagtagtcaagtactcgtttgataatgttcaaaagttactaaatatgctttaaatttaaattatttttaaaagacacatttattctccatgaaagatattttttctcgaatcagatcatattactacatgctgaaagtaaaactttttctttaagtatttagactatatatagtcaaaactcaaacacaagagacacggattaaacaataataactatgcaccacattatctatgtgtttagtggttctctaattttaacttgttgacattaacatacatttttttttatcatattataagtataaagtatccattaacaaaatatttaatatatatttatataattatgccaaaaatgttattttttaataatttattttatttaatacaaaacaaactaatttgcaatattagatctaatgtaaattactattatttaagttttttttttttttcaaaacgatatttaagtaaaacttagtagttgtacaaattttttgacatcttcaaacttactaatcaagccagctcaaaattggttccggttgaattggatattcagtatcgctatttgttaagtacatttagaatcagaagggatagtaaaaattgtttatattgaaacaatcaaaccatgtatatgctctagatagttttcgggaaaattgttaatctaatgccaaatgcaccccaacaagtattaaatataaatatatcttacaccaaaagatacaaaatacacatctaaaaagaattcatagatatataccacgcgggcttttgtgctcatagtatccaacccgagaagcaattgaggaactaagaatggacaagcgtagctacaacaaataagattgaaagaatttgctccttttaagaagaacaaaaaaaaatgtggattgttcatctagtctgaagccaaaagcttcatgccactcaaacctagaagagatgtggaaaatagagggttgagaccaccaaaagcaactttttctccattttttttttttttttttgttttttcttagaaggaagtttagagatgattttactcaaagcagaagaagagaagctataaacacagcgagagtggacaagaagaagcagacagtgaccttaggctgtgaatttccctgtggtgatttggttccggcattcgggctggaagctggggctattttagcaacaggaggcaaaggtggctctgccacttcagattctgtcaagggtggaaacggagcctcggctggaggcaagaattctttggtaatgagtccaaaaagaccacctggttgaacaggttccatgtaagtaggtttgttgtcacccaaacctaagcatttgttccctgcagtagaacggagaaaaattatttcagtaaaaactgtttatattgaaacaatcaacccatggtacagcagaatttgctagcacttacttctgtatctgtcagcagttttagggaagtctgtgatgataccatcaatttgtgctccctcaatatatgagttgatctcaacagttgcatctgagaagaaatcccatgcttgagacacaaactcattgctgaatgtttctacaaaaactgagaggttagcattttttagctttggcacaatatttgtataggccgtcaggaattgatcattattaggaattacggagtccttgttgacaaccacagaactagcaaagttctttatatcctcaacagctgcatttgcagcatcaccaacagtctcgtcaatcttgtacacaagctcataactggttttctccttgaacttcagcagtacagaactattagtggattgaatataaaccttttgggatcctggtttatcataacctgctttgctcaaaacatcgatgacagcatcaatcacacttaatccttgcttgtctgcaagataggctgcattctgataagaagaacaacaacaacaacacaatatacatgttagtaaatagaagatgaaagaaaaggaaaaaaaatcatttgcacacaaggaacatgccaaataattctttacttggttgaaataaatcagggtgaatagagtcagtgaagaaatatttgatgttaaattcacacgagtttggcaggtgagtcattttgtttttggtttcaaaagagaaagttgtcagctgcatgaagtacaagtagaactccaaagagttaaaaacagtatatttcataatttttggccaacaaaaacaagtgagaaacaggtcttgtaacaatttgatagaaataatgcatgatagtcttaatatttcttatttctatttcccctcttattccaaggtgaaatcattcataggaattattaaataacttaagtgaccctaagccgttctcacaaaaatttgtcctaattcttcaaacaaaattatatgttcaaataacagccggtagaatgaatactacaaaaagaatgaataggcacggaagcacacacctcaacaatgatagcaacacctgatagagaagtctgattttttgtcaaggacaagaaatctgataatgccaacaatgtcccagcattcttagattttggattcctgaacaatctgtattttgcaaaaggattcaatattgaggctgcagggaaaatagagaagagaaaaatatgtcaaatatttgttataacacttatcataggcagcaagtgaaaggcaccaaaagatatgagagggaaaattttgccatggtaatttatcagtgagacattaattgtcctataaagtgaagttgtaagctaatttccccattattcccaaaacacgacttgtttcaatgttcatatatctcattctgaattttggctatatgacgtatcagtcaactaagctttgacaaagtagggatgccaaattattgattccattaggctttttgcttcatgggtttggttcttgtccccccatctgttgtttttatgttcctcttctttttggttaatatatttccagtgtgcagtaagtgattgttagttgctttggtgccaacatagttgggattaaagaaactaaagtgatgcatttgcatgctgttttgtttaaaaaataatattgtgattttagtccccctagtttctcaaattcatgattttggttccctgaattttaattcatagtcttataaattggtgattttggtcttccagatagattattaacaaataattatcattaattgagttattaaatcaattataaattaatcaaaaccattaattattaaaaattgaataaaaattattaatcctaattttctgcaacactgttcttcctcttctctgcaaatacctcttctatctccattgtgtcgcacgcgactccaccagcagtaacaccacattaggtttaatagtgttttatcaaagcctttttaatgattaataatttttatttaatttataattaatttaatctctctaataatcataattattaaccaaaatcacaaattcataaaactaggggaccaaatgttacaattaaaaatcaaggggaccaaaatcatggatttggaaaactagggggaccaaaattgcaattcagccaaaataataattaagctttgacaagtctggattaactccatgcaaatacagaaataaatagctaacaactacagaactttcagacttacgggtcaagctttttatatcattccatgtcaagttgaatgcaaatatgccactgccagatttgatctcggggatagtcatggcaaatttgctgaagcttgattgggtgactgttgtactctctataagatcaatggagtttaagcaaaatggtgttccatccttagacatttgaacaggacagtcaagaacatccacaccatcagatatggccttattatatgctaagtcggtacaagcaggataatctccactcgctccatattttgagataaccaaagttttatctgaaacatgataaaaaagtgagagaaacaaatcatcaataatgcaagctatgcttccatcgaatgataaaaatcatacagtcaaacaactagaaatcactaagaacaacatgataatacatattccaaaatcaaaacaagttaccttttttcgtagcattggtgcctaggtgagcaaagcaacctgcattataagaagacaacacagtatctacttaaatagagaaaaaaaaaaggattggaaacacaaacatacagacatgttctgagattacaatttataagtatgcagtaggacccacaagcgactaatatcaactacatgcttatgtcttatgcttatatgatgtaaaagcattttaaaattgagaaagaaaattctaattaggatagctaataagaatgcaatgcctagaaggcaaacatcgctatgtgctttcatgcagcatgacaaaatcttttactatagttgattaaagagtatataactggaccatatctgatctgcctaaaggagcctgccctaagctgaatttagtttacagtgggagcttgaaagcaggaggtggtgagagattggctaaaagtacatatttttagtaactttgttcatgcacttgcaccagcattcggacatgaaatcctttagtcaaagtcaacataaatcccatctgtatccttccattgattaaggattgcataacaatcttagtggcatactcatgcaaagtgaaagtatctgcttacaaagattggatagtaaggataaattagcttataaatatatcagttttgggcagattgatcagtaaaacaatttcactgaggattaaaattgaggatttgccccatgaagtttaaacaagccatccgtggccactctaaaattgaaaaggcaagcaaatgcaagaggcacgtttaaggtgattcacacaaacactatgagcatgagattaggaagacattaggataattttatttaatggaaccttatagctgcatcaactccatcccaagggacaaatactgtatatagtaaaaatctgaaaatatatgcaaggatatgtttggttggaagagtttgaaggggaagtgatgacagcagatttttcatttataaaatgtttacaaaaacgaataagtgatgattggcaagttacactataatctgattatacccccccccccccccagttctgttatttaagaaaatcttaaataattagaatgtttacataaaacaaatattgtctcccttctaaactcttgcaaccaagcataccctacgtctacgtaaacaacattttgataaaatcaaatgcattctaattgtggcaggctattctgataacatggcagaataaacaaataaacagcttacctatagcttcaaatggagttatgggaaaatcagagagcacaccatcaacagagaagtcaccattgtctacaaattggaggtactcggcaagaggatcataactgtaattgaagctagatggaacatcgttcacaaaatctgatgcaaaaacttctagccctgctttatgtgcatctgagaccaaagatgtatgtggttgtagataaagagttgcatgatctacaggccatatgtatccctttggaacaagaattccagaagcaaatgtcttgataaatgtaagattttttaaaagcgaaccataagtccgattggttgatggatctacatcactctgtcccataaacctgaagaccaattttgttgtttttgggttgaagcgtgatgctatacttctcagaaaaccaacctcaggtgatgagatataactgaaaactactcttctagaaactgaaatcacaaagcttcgcatactcaaattgtgttgtgcgtagaatgcatcatgctttaaaatataagagaaaacaagagttagatttaaaacaaggagactgaatgatgagaatggattatgcattcattctatttacctgaatattcaaccatattccttttggtttttgcgttaatttaactaaatcatcaacagtaagaattccaaaattgttgccatcatacaggttggatcgagagtatactccctgagttactgtccagaaacaagaaactgtcagcaactatataaagaaacaacttccctatccaaaaagaaaaaagaaacaacttcaaagctcatttgcaagctgagacagaaaagggtttaaaaagatcctgattagaagctaaaccttaaatcaacaacacatatatacaccgcagaaaagaatcactcagtccatcaaatactgaaagtttataactattaggaataaaactacatgtttgaaataaactaaactcacagacaacactagataggtccttcagagtataatccagaggaaaatagccacgggtgggtacaccattaactaagtaacttgtggttttatttgggtaagcggttgcaatgtaagtagaatttgcaaggtttatatctggctggcaaatcccaactccatcttttgttaattgcacatcacaccatatatagacatctggtccactcgttattactgccaaattataggcagcatcactggaatcaggaagtatccccgaaaatccaccacgtgctacaaccaacggcgcacctcctgcaaaacaagtatacaagtaagtttcaaaacacctaacacagtgaaagttcctccttaaataataataataataaaaagtgcaaaagttattcaagaacatattctaaaactgaaagtggcaacagtctctgatattatatgaatcgtattcagtcagcgattggcctttagatttcatggaaaaaattgtttgttgaagatcctacatcagactaatgatatggcaaaaaagagtgtataaatagggggcaaccctcatttcttaagctagcatttaagattgaatatgacaacccaaattctaaattctaaaacaggtattggagctgatcctagcgatcattgttgaatctattgggtcaaccgttaagtcatgcaagcttcacatcgaagatgtctagtccttggcgtggagaaggctagctagcttttgaggttgagttaggctcaaacccaaattgtaagagttgaatccgcaaacagttcattcagccaaaactttccctgacaacaaataactaatgtttccttttcacatatgatattctcagattaagctctcgagaaacgtcaaactctttctaagcactgcatataatatctccatagaccataaactagctcgaagcttagctaagccatttatccaaatccgaactcaggtcaaagtaacaaacgaaatcaaagtttacaaaaaaaagaaaaacacagatcgtacacttggttagtgattattaggtaagtaaatagtaagtgaaaagagacagaagcaaagatggtagtaaaacacgagacattaccgctgagagtgttccagatagatctctgagcagagacgagagaaaggagcgagtgaagaagaagcagagcgagtggcgcagagagagcgcgtgaattccacatcccggcaaccttggcacttggcagattaagaccaggagcaagtgatgaacccaaccacctcaaaacttttagagagagaaagtgtgtgtgagacaatgaggtcttaactcagcagaagaactttttctgaagtggtggccttttagtattttctttcttgcatttatcattgtgttctgttgtgtatttacatatatatagtattatttaaatttttttttcactgatcaaatcttttcattcataaaatttgaaaacaagatctttaaagactgaattcactggaaccaatgactaattagtgttgttggaggtattaatattgtagtgttatttaatagtgtagtctgaaaaatataaataaaagtaaaaaaaaaaatgtggggcgaagtggacaagctggcttgagctaagccgcggttttgactgatgtagtatgtggtgcggagtggggtccacaacgtggttgtcaaactctggcaaggtatacgtggcgggctgtgattggtgctgaggaaacgcacaaaaccgcaaggttctaagatcatatttggtggcatcttcaactatttttgttagactatataatgttaatgaagatcttttaaaaaaaaattatttttttagtagtagattttattttaaaattattatttttaaaataatatatagatattaaaaattcttttaaaaaacttattttttatgttaaaaatctattgacttcatttattaaaagatatagtaaatatcatatattgaattcaatatttaatagtaaaaatgttctacgtgggtgtccaccgtagaagaacaacgtgcgaccgtgaattgcgactctgatttgatggtggtgaggtgagggtgagtgggtttcatttcatttttgatgctattgccgagtgagactgctcccactgcattgcacacttttattcgttctttttcaagtactttgtcaaagtccaacatgttcagaatatatgtggtattagatactacagttactcttcatcaccacttttgattattacattaaaatctaaccatagataagaacatatatctcgtttctttctcatcttcatgacaacgagtttgtggtcattaatttgaattgtgatgatggacctggtccagttgcataaattaaatgatctgtctatgtttggttttatcgtgttatgacatattgacgttgaaaactcattttgaggccatgactatttcaaaaggccaaatattacttaattattttagatttgtctcattaatttttattatttatttattaagcagtgatatacatataataatttttttaatctattacatcatttatttttttttcttctcttccgaaatttctctttgcatgcgctgaattatatatatatgtaagagtattcttacccgtttttttaatattagtggttagctcaccaaaaaaatatattagtggttagctggaaggctctttaaatgttcgtccttaaactagagaagaaaaaagagcaaggcacaaagtatacgttgcaccactttctgaattgtaatcctccctatccatgtggtttcaatatatatatatatatatatatatatatatatatatatatatatattatatttaggggtgtgaaaaagaattaattctgatggaatcggattgtaatcgaacttgaatcaaattaattttttctcgacttagtttaagaaaaaaaatagtacactatcttataaaactattttgattaatcaaattgtttctataaaatcgattcggttaatcaaactgaatttcatttgaatatttttttatttgaaaaaaatagttcgaaattggttttatttgttcttaaaatcagattaaaattgattaaaagttaattcgatacatagctaattttttaaaactagattgttctttaaacggttttcaaattaatttgactatttgaatataaaactgaatcgattaacacagaccaatttagttcgatttttttaccatactaatttttgcacaccttactattattggaagtaataaacattttatactctttttgataaacttttctttttctttttcaagtgactaaataaattataaatctcaatgaaaagttaatcagtttttcttagtgaattatacgcataaattggataaataagtttaatcaaaattaattaatacatctgtaatacattttgagtatggcataaaggcacctaagaactagaatttcaaggaaatagcaagaggggcaaatctgtgaagataaggtgaacaatgaaagacatggattgtataagaaggaaattattgacgggtagggaattatcagaaaaagacatcgagaataaagaatctaattcgatggttgttacttgttagtgttctaagacagaaacttacaagttagacaaactggagttatggcaacttaaacgagtttacttttcaatgaaatgctgtcattgcattattgatattgcatgcttggccagactaggaattttccttgttcctatggacgaattctctgcaactcttgggttactttttctactcaagttatattaatatattccttttgctttccaaaaaaaatgtagaagtttcaagatgaaaaatcaaacctaaatcccattgacttccaagtcaattctactaatgctgttagaaacaatcttaatatatatagcgttatagatggggtagaaaatggatgtttatatgatatataataaagaaaaagaaactccaaaatagataaaaaatcaaaccattcaaatacctatgcctcatctttgcagacaataacctccaagtcaatgtaacatagtggcagtaaagggaattaatgacacattatagagtagaaaatggaaaaatattagcgcagtgaaaggattagaaaaatgaataatgtttgtttgcgtgagggatgggctcttgcatctagtgtttttaatctggctataaatattcatctttggttgcttaccctttcaaataaattttcctttgaagtaagttagaatggagtcaatgtgatggatggggtggttgtttctgtgtaggcatttgttactcgagtctctaaatttgtgcaacaacaagctacggggcaatattccaaaatccatgttcagccttgtaaaccttactcacttgtgtctatcaccttactcacttgtgtctatcatcaaacaacttcagtggatctgtccactttccactcttctccaagcttcataatttggaaaaattttccctttcgcacaatgatcaattatcactaaatttcaaatccaatgtcaattacagtttctcctgcttaactagtttggacctatcttttataggtttatctgaatttccaaaattatcggccggtaaaagttccaatttggggatctcttgatatgtccattaacaaacttagtggaagagtgcccaattgattacatgaaatgatttcattctattatttggacctctctcaaaacctgttgacaacaccaatggaccaattctcaaggaactaccaactctattaccttgatattagtttcaactcaaacactggtggcatctcttcgtcaatttgcaatgcaagtttacttcagagtctcagcttgtcccacaacaaattgacaggcatcattccccaatgcctttcaaacttatcatcccttcaagtattagatttacagatgaacaaattttatggcactttacctagtaccttttcgaagaaaagtttgctcggtactttgaatctcaatggcaaccaattttgaaggtcttttgccaaaatctttgtccaattgcacagaagtggatttttaaatcttggcaacaatcaaattgaggatacatttcccccttggcttcaaactctaccatatttggaagtattggttttgcaagccaataagttgcacggtcccattcccagttaaagaccaagcatccatttcgaagtttagttatttttgatatctcatccaacaacttcattggcccaataccaaaatcctacatacaaaattttgaagccatgaagaatgtcgtccaagataaagtgggtaacggtttgcaggaatacatggaaacatctataatgaatggaacatacactgattctgtgactgtaacaatgaaagccattagtatgacactcaacaaaatccaaacaaactttgtaagcattgatttatcaggaaacaaatttgaaggagaaattccgaatgttattggagagcttcatgcactcagagggctcaacctttcccataacagactatgcagtcctattccccaatccctgggaaatttgacaaacttggaatcattggatctctcctcaaatattctcactggtaggattcctacagaattaaccgatttgaactttcttgaagtactcaatctttcccataaccatcttgtaggagaaatacctcatggaaaacagttcaatacttttttgaatgattcttatgagggaaatttggggttatgtggagtccaattgtcaatgaaatgcaacaatgaccgtgaacaacattctccatcttcaccgaccttgtggagagaagagaaatttggatttggttggaaaccagtggctataggatatggatgtggaatggtatttggagtgggcatgggatgttgtgtgttattaataggaaagcctcaatggcttgtaagaatggttagaggtcaacttaataaaaaggtgaaaaagaagacaaggatgagaactcatgaaattgtagcagaatgaattagtggatatctggcatggctggaatttgtcttgttcctcactttcctgttcaattccatttctgccttcttcgaaaacaaaaaacttaagggcaaaaagcttatcacattgcattgcaggggagatctgattcaaatttttgtaatatgaatgtcatatttttcatttggtataatttgtttgccttcgatcttgcaattttgttttatttaatacatataattgtcgatattggttatatattactagcggttgttgtatacttttaaaactgtttatatgtaccggtcattgctagaatatttgtgtcttaacattatggaattgtctcattttgttcaagtatttcatttcgcatcttcatcttctaatatagtctatttagttttctatacttgcttctagtgttgtttttcagccaagtacattatctatgtactcaccttaactaattgattttctagttttacattaacaaaaccattagcacaaaaggattattaaagatctccataaaaattctctgtgatctaacaatagaaggcagataagtgttttgacgaaagaaaagttcgatggacggttggactgcataacagaggttggaacttggaagatctgagaacacattttattaaaaccaatctacctgccaatgagaactttggatttccacatattctaagctttgatgtagctttgtccagaatccctttgaaggagtctctagccactctgtcattgatgtataagaactcccaaatattttccctaagttatccatcctaccaaaactgaatttagtgctaatctgatctctaattctccatacttggagaaaaaaagatctttatcttatccctgctaatcacttgaccccagctagagcagaaactgctaaatctctctaatgtgactcccgagttacttgttgccttgctattgattcttttttgttcttttggggcctttaatgtttgatactatgatggaattctcttgaactcttgtttgaaacttgaaatctaaacctgccattatgacatggttaagaacatatttacttcggatgttttcatcccacgtatagcttgttgtctttgtttaatgaagctagatcatcaattgggtttgagtgtcttagaaaaactcacattacttctactcatctcatactgatgcggaaatgttgtgaaggatgcattactatctatattttttaaatattatttattactattattatggtgttttgtttattgagtttcttctcagaaccaagaaccaaacattttatataaacatatttcaagttccagaggaaaggaataatagacgtctggatattttgtagacatggagggaaaagagtaatgagattttgtattcttgtacattaaacacctttgcaacatctacaacatcaggcactaatacaccacacgtctacttgcaaacttttgggcaaaacacgttgattaaaatgaactgcacctttattggagggacatcagatgctgtcttaaaacttggaagcttctttaagtgttaaaatgaaacaccagacagcaattgaagactaagaggttcttaattgtaatggaaaaatctatagaggcaaggcagattgactagactgtgccatactctccttaaccaggtgttgagcttgcttaattctcaaatttgctcctttcatgagcttctaattgagacattgggctaaggtgtgcccaaatgaaccttgtcttcctgcaataagttcaatgaaaatatactgttagggatgtgcagcaatctgctgtggagatattccaacatttggcagtgttcagtggcaaaggataaagaaaacatttggcagtttaccaagtgccaacaggcttaatgttttcaagtttgaccttttcataagctactcattagcttgtttttgacaaattgcacaaaggaagatgatgtattcttatcacgatatactgtttgcattatactaaaaccccacaaaaaacaaccctattaagtgttcatggatgctttaatactataactaataagagttcatgccccagcctgcagataggagagagagggttggcagaaggaagaggtgaccaagttgccataaaggtggtatttgctgaagtacatttttatttctttgaaatttgatgctttgttgatttaagacctatgctccaatccaaaagtatgaggcaacctgtataaaggatttataatatttttctcaacaatctgttatttccctcacaatgttgacaactcgtgaaaacattgagattttaaacaatgttaaattgtttgtgctaaaaacactaccttgcacatgccgtatgtaattcagtagcatatccatccttgttcttctacaatgcattcctgtaatagttgtcttggaaattgagagaaatattgctgatggggatcatattacttggacttgtttaaatccaagtcataagtgtttttaagagtttttctagtaaagaaattcttaaaaatacttatagtcttgtatccaaacagactccttgtcttgatcagcaagagcattctttaacttaggctccaacagctattgggatcttgattcatcatacttccacccgttacattcattagtcacttgttcactttatcgaatacatgataatgagtagtgctgtaccatcacgaggagcttcgcgaatactgcaattccaacggtgacaaatatcacgggcatgttggtggtgtcaacaatcatgtcctttctcgttgttctgcttatcttccttttcttctccattattatgttgttttctctgaaactcaaaataaaggaatgaagctagtagacgaaattcatgcaggaaagaatgagtttggagactgtaacttcttattgttctttatccaaatattgagttcaattcatggatgtataatgacaataatacactaattgcggagaagagagctacaaaagttttaattaatgtcataaattgtaatgacaataacatacaaattgcaaaaatgagtgtcacgccatttaagcagctcgacccagagtactttggttttagtgacaatttcaatgaacaagagtgtaatggcaccaattatagaaacctttgatgttaaatgagagttattggaagaattgtagaaaagaatgacacgtagcaaaacatgtgatgtaaaaaaattatataaacatgcaatattatattttgcaactctaaatttatatatggtaaatagataaatagtcaagtattagaaataagttacatatgtttggataatagtgatcaaaatcaagtcttataattataacatgtgttttattttaatacaataaactgtataagatattaattaaaaactatatttaaactatttaataatttaaaatcaattatatgtaactttaaaacaagcatccttcatctttttattgttttcagcaaagttaacaaaagatttctgataagaaaaacaaatgatatttaatattcttaaggtttaatttttatgtattataagtaaaaattcggtacctatcagtcatttagaattattgttaatttaatttttaaaataattattataaaagttattgcattcaatttttttaggacaacagtgaatccactattcattctttgaccttttttataaaaatataacagaattacgataaaattgaccatgctataaattgaaaaggtagtaatttgcttgaataaaaaattggacacgagatcttatggaatataaatatagcaagaaccttgacaaaaaaaaatgtaataatataatgttgcgtaatgcattgttcactttgtcacaaaccgaatcccagctgtgatgatgaacatgcccgccataacgacgcttgttttttgctgagatcacaaagtcggttccacaaaacaccaaaaaaactatacacctagagaacgacgtgtgcgaagcgtagagcgagttcaagatactctcgcggttaacccacgcgcgcaatctgaaaccaaaccaacaacaacaaaaaataaaaataaaaacaagacagtcatagactcatagcataggacttgggagtcacacggtcggttctcttctctgtcactttgcctacccactaagaaaaatcgatcctttcttctcttccttgcgcatctcttctcttcattcaattcaattgtggtgttagtgaaataataatgaaggggtagttgagcattcaaacaacccataccctcatttttatgtgtgggtatgttctcattattattttcattcactcattaacttcaacaaatgcatacaattactacaatgttgtatctgcttctgcgtggttctcactcaagttcttatctttcttcccttcttcctcgatctcaatcttcccaactggattttgctctgcggggggaggggtaaataactcaatacccatgagacttgctatactttcgttgaaaaaccattggatagatgtgaaatgcgtcataccctttttctgtgtttgatggaattgagcttctggtcattgtttttatgatggttttttttttttttaataactaatccaacgaactctcttatttcattttattttaatcttttgtgtcttatatcgttgttctgttttttttttcttttcctttttaagcttatcttttgtttgtgttgtctgtcaggataacgttggacaggttggtgactccgggagctaaaccacttcttgtttgggatttgttgtagatttggccttatatttgaattagaccgtgtagaattgcatctggcaataggttgttgagtcgtacgcataacgcattgttttgtgttacaaatattcttaagcttttctggggaatttttgtggtttgggggataccatacaatttgtagctttggtttgtgattctccaagatgtcaaaatttgagggtgttattgtctccgatcaatggcttcaaagccagttcacgcaagttgagcttcgcagcctgaaatccaaagtaggttcatttcattgcttccttgtaatcgacattttagtccaatttcattactcttttaaatttgttgtctttcatgctttgtgtttttttttttttttttttttttttttttttaaccttattggacccttctttctgttgttgtagtttgtctctttaaagaatcagaaaggtaaagttacatttggagatttgccgcctttaatggtgaagctaaatgcattcagagacatgtacggtgaggatgagattagggggatcttgggtgaatcaggcactgattttaccaatgacattgattttgaagctttcttaaaggttagtaatttggtgtttttgactttttctttttttaatattactacattaggtaacttttttccatgttgtgaacttataataatgggatattatgtgtaagttagttgtattaatgaaacagtttatgtgccatataacaacattaaatataatgttatgtagccttacaatttattacatttttcatgcaggcatatttgaatttgcaaagccaagctactacaaaacaaggtggtaggaggcactcctcgtcgttcctcaaggaaaccgtgaccacccttcttcacacgatcggtgaatcagaaaaggcttgctatgttgcccacataaacagctaccttggtgatgatccatttttgaaggaatatcttcctttggacccagctacaaatgatatatttgatcttgcaaaagatggcgttcttctgtggtatataagcagggtctgctgattgttgcattttacttatgtctgtatgagcctttaatgtatattggctttgatatatgtcgtgtttaatgcagtaaacttatcaatgttgctgtgcctgggacaatagatgagcgagccatcaattgcaaacggaatcctagtctttgggaggtaaacgagaaccatactctatgcctcaattccgccaaggctattggctgcacagtggttaacattggcgcacaggacttagttgaaggaagagtgagttttagcaatacgcacttcccctattcctctatagacatttacttaggttcttaatttttattctttgtgacattattgtttgggtgtttatgttgcagcctcatcttgttctagggttgatttcccaaatcataaaggtaaatatttgaactgcacatatcattcgtttattgttagtttagtggttgattttgcttatatgtttacatcatttttcttaatggcctaatatatcttttgacttcagaaatgattacatagtcattgttctcttttcctctcaatctcttggtaatttcagattcagctgctggctgatctcaaccttaagaagacacctcagcttgtggaattggttgatgacaacgaggtaataagatacgcattttttttctttaatttttatttccaattaaatcaaattttgatgtttcattctttgcacattgtgtttcaggataactgatgtattttgcatttcattgttgtcttaggagatcgaagagcttcttaatttgtctcctgaaaaggttctactaaaatggatgaattttcatctccagagagcgggttacgagaaaactgtcagaaatttttcttctgatgttaaggtatatgagtataggtataaatttgtacaatgagtattgataagtaaaaaatatatctattatataaggtacaaacattgcataaatgagtatcattgggcccctatatttaaaacaatcagggtacttttagcagatttttgatgttcaaagggcttttacaaatattcagttccctgttggaacttgggtgtctcccagtcctacttgtccttcataatctcatactattcaaagtatggatgttaaaatgtggtcttgaaaatattaattactgctgttctcctccccttaaaaaatctgcattgcaaattttggattttttacttattaaccttgaactgaacctgctaaggcttctctgctcacaacaaataatggttgtttgtaccttgtataatgcatatattttttgtaacaaattgttaatgtattcttaaaaggtaactgtcacatatattattcttatggggtaaatgggcaacatgaccataaatatattcatgtccatacatatacacacacgcacatgcacaccacactttgacagctagatgcttttagtacatatatacttgaataacaatcccgtctatcccacttcatggaatgggagtatctaagtgtgtaatgcatgacatagaatggaaatgtgacctttgaccatgtcatattgcttaatatgttttaagaggttgttcactcggcaaaaaatccaattccaatttttcatatgtttgttcctgcagaattgcaatttcttcaactcccaacttctaagccaatagtgtcataactcatgatagttttgcctctacaatttgaaattgaatcaagctattaacaaaccattatcctaatgtgttcacacccatttatttacaggatggagaggcctatgcttatctgcttaatgtccttgctcctgaacattgcagtccggccaccttggataccaaggatgccaatgaaagggcaaatctggttcttgatcacgcagagagaatgggctgcaaaagatacctgaccccaagcgatgttgcagagggtacttcaaatttgaatcttgcatttgttgcacaattgtttcatcataggtataaaatgaattgcatagttaattttatgcagactatttgataatttaaataaatattcttatgcatgttaatttctgaatctgtttaagtgctgtagttatttaattagtgccctacacattgcaggagtggtctatctacagacactaaaaagatgtcctatgctgagatgatgacagatgatgtgcaaacatctagagaagagagatgcttccgactgtggatcaatagtcttggaatttctacacatgtaaataatctgtttgaggatgtcaagaatgggtatgtgttccttttcttaaactgcatttattatttttggcaaaatctaaatccttgtatatctgtagaagtgtaaatttttaattttctggatctcaaaacataccaaatgatccacatggcacgtgtttatccactgattgggaaaaattaaatgaatgtgttatcaaaatttaatttgttaattcactaagttcttatgtgcttgattccttttactttatgcatgtagatggatacttttagaagtgttagacaagatatttccaggatcagttaactggaaacatgcaacaagacctccaattagaatgccattcagaaaagtagagaactgcaatcaggtcataaaaattggtaaacaactgagattctcactagtcaatgtagctggtaatgacattgtgcaaggaaataagaagctcattcttggtaatctcttcatatggatataatttactcttattttttataaattttttatgaccgctttcccacctatttgttttggctttcaattttatctaaaatatttttttccagctttattgtggcagctcatgcgattcacaatgcttcaactgttgaaaaatttgagatctcattcccaaggaaaggagatcactgatgctgatattctgaaatgggtgaacagaaaagtgaagagcattggcagaacttcccacatagagagcttcaaggttttttccaaaagaaattctctgttttatttgctgttaacaattcccaacaactgtaaactataaaataatgatttatccgtgacaaatttttgtatcaaattttttgcacaggataagagcttgtcaagtggactctttttccttgagcttctgagtgctgttgagcctaggattgtcaattggaaccttgtcaccaagggtgaaagcggtatgattctttatagggatattaaacagatcctttgtataacatgtaattacttgctactttttttcatccctcctaaattggcttaatttgttgtaattgtagatgatgagaagaggttgaatgccacttatataatcagtgttgcacggaagctcggttgttccatatttttgttacctgaggatattatggaggtatgttgcctcttgccacctgagagtttcattcatatttgctacaaaaatttatacacattagtcttctttgaataaacttcataagttcttataagagaaacaagcaaggtaaaataatttaaatttctcccgtaattaaaatcaaactttacacttcagcttttataaaaagttcttttatttaagttctccaaaagctaagtgtataaattgatttaaacttatgggtgaaatttaattcattttatcttattttcttcttctacaagtgtttatgcagaacttcattcaaacaaggccatcatgtaatttggcaatgataccaaaaaattaagttgacacattctgggttcagtttgtttatgatgtgattgattctttgttgatatcatggcaggttaatcagaagatgattctcactcttgcagccagtataatgtattggagcctgcaacaacagactgaagacatggattcatttccttcacctggcggcactgctactaccaccacgcccgaagcatccctggcaccttcggtatgtggtgaagatgaaagttctgccattggtggcgaattctccaacttgagtgttgacgatgccacctctgacaccacagccacttcttcacaacccgagtctgacagcgtttctgtgggagatgagctgttatgagtcatctagttggcatgagatgagtgttaaatgtttttgttaaagggagaatataacgagtaatgaacttgcaaagcttaagaaacaccttcacaatggtctcaaccttcaaaaaagttggggatgaaaacatacctttagaatagtatatgtgaatagtctgtacaaaaatatctttgttctttggagagaaatgcttattcagagggataagaatgaataaagcttagaggggaagaaagaaatgaatgtgatcaattcacacttgtcccttatattgcctttaagtaggttccactactgtatttgtattttgtcattcattacgttatgatggccaacaatggtgaccatttaccgtgtcaaataaacagaaaatttataactagttctcattcattcttacacggaattataaggtttaagctgataaaagcatgggaaaaagattaaatgctgtgtgaatgtctcaaagccttgacatattttttctgtcgatagattcgttaaacgaggtggatttgttgattttttatttttttgcggtataggttaggtttttaatctaccaatgttttgacttatcccactcaatctgtcaaagaacacctgtgaatatgtttttctttttcttttgggatttattggtaattatcatataaatagtctttcatgatttttgtgtttggattgtattagaaatattttaggataagatggatataaaagtgatgataagagaaatataagttttaatttaacattttttagtacattagataacattattgtactatcttgtccttatgtgataaaagttaaatagataatagtggtagtgatgataatgatattattgatgatatcaatttataacaatgttaataataatgatatcagtgtggtgatatcaatctataataatggttataatgacgaaataatgatgataataatgataatagttataataagagtgatagtaatgataatgatgataataaaaattatgatggaaaagtgatagagattatggtaagctagtgataattactggttagaaaaaagatgaaatatgtaaattcatttcaataaattgggttaaaaattctaatcgattttcacaaataacaaaaattgaaaacagattaacaaaagaacctactaaatatacattatattatgttatcttacctgtatgtgtgtatggatatatatcttagagtttaatggttacgtattttcgaaaaaaattggacacgggtcctctcacgttgaaaaaatctggagtgtcaattgaagaaatatacattgttgatcaaaatgagtggacaggatctgttcatacaaaacttagttctcaactgctgtactactttctttgacgcagaaagagaaaagtaaaacattcatttactaaaaaaagtattatattttcaataaaaaagttcttaaaaatacctctaacttatattcaaatagattttatatatttattcattaaaaagaaattacttatttctctgatcgcacgaacaagatgtccatgtctaggtcatggtgcttattcgagccctctaagcatatgaacatgtcatagcatatgaacattgtgatattaagaatataaattttctattttatataaaagagttttaattctatttttttacgtttcataatgtttagtaaataatttaaattttctacccgtcagcatgtgcacactaaaaagaaggagaaaaaaaaatcttgaccagcagatttaagaatagaaatctgtactatgcgcgatggtccgaatggttattggtcgataacaattaataaagctgttccattccacaagtgccaccaaaatcattgggatattaagaattcaggcgagaaggggatcaagaacaaagaagaataatagaagtatcaaaatgtatggaaatggaaggagaaatgaaggtatgggtttgaatcctagcttccctatgttactgttatttcatatcatgaagggtccctctccccagtgttgtacctattcaccatcctaccccttcaacccaccactgtcctcccaacaggtgtcactgccttcttcatcacttgggtcaccaactccaaactcctcctcttcactttctctcctttgcatgcctcccaaatagactcaccccaaaaacaaaacccatcaaaatcaaaattaaaatttcatttcattatttttccaatcaaggccttgctttttggtctctcactcataggccttaaagaccactacaaacaaaaacttcaccctacaattattttgggcatatattgcaccctcatgtatcttttaatggatgttgttttgggactatgcaacattgtggtcaatgcttgcatttgggattgagcttcaattgccgtcagatgacccttatttgtcaatttctttgcgtgatttcttggggagaaggtggaacctcattgtaacatataccctgcgtcacaccgtatacaatcccgtgaaatcattattgatgtccaataccatgttgggcccccagtgggcctcggtgtcggcagtcatgatctgctttttacatcatttaaatttctaatacactatttcataacagtggaataccaaaattatctttggcattttctctcatatgaatctacgtaattcatacggattgacaaatccgtaaaaaccttaacttataagatagtgtaaaactgtttaatattattcttatataaacattaaacacttctattattctcaattattctcaattttacttttccaatttcattgtctcgcgcattaatcagagagcatcacggtgcatcatactatacgcatcatattataccccgtattatttgaaaaagacgtatattatttgtttacagtttcttttttaattttatttttcgacaagtaaacgattgttgctcttcttgcacgttttgcacttactaattttgttttatgtatgaatatttatctatatagaaaaacaagtgaaatatagtcactgcattcttttgttcttagtttattaatttctgtcttacctatgtgatttctttttaatctcgtgacgtgcaggaaaactgacaaatggttaaacttttaagttagaggaattatttagtagtttaatattatcataattttaacttgtcctttttatttatttatttattttttggtcgaccaatattaattgttaaatgttaattttttttgttagtgaagagatttcaacccacaacctcttcttcttttccttccttatctttttttccttttaccactcaaccaatcttatatctcctcaaatgttgatgtcctattcctatatcaaaatacaccacacacattttcttcatttctatttctatattagaaatactgatactaatatctgaaattttaccataatcctatagactatccgtgatagtagtttattttggattcgagatttaattattaattgcttgaaatttcagatattgattaaagaatgtttaatataatactgatatattagatatttttcatttttagtataataaatattttttttctagatttgttggcattttaatgataaggaaagttatatattaacatagagtgcagatcttctaaagtaaaatatttgataaagtaattaaattgttggctagtttaatacttaaactataaacttgaccacaccatatccattctttatatatactatatttattccatttttattgaccttattatttctcctattttactattgttattgagcttttgtgattcaacaatcagtatgtgaatcacttgtaatttgctatataatttataaagggtaacgataattgtgaaatatttgtaaagtgtatttttctcttcaacatgaccgtatcttgctgcttaacaataggagaggattcacattcgatgcaagcattaatcaattgcaaaagaaaacctattcacctcgtgctaatttcggttacagtttactaaataaaaggcttcttttttcatttttttttaccatctgtatgtatgttggctcttatggaaaacattataaccggaaataaataaaaaatccatgtgacgtcacataattcatcacgtttcttataattggtaatgaccatgattgcatgaaaaaatcctctcatcaatttttttttttataatatagtaaaaccgagatataattttcttatttcatcaaaatacttatggaacgaacaagggttgaatacaacaattgtaacaacatgggataatgcccgcaatggaagatgatccaattgaaacgtcattatccaacaagaatacatacagatccagccagagaaaatactgaattatttatgagagctgaaattatctcctctccagcgtctaactagtgattcacattcttaagagttgcatctgtttatacagaaagttattcaccctcactcaagataggtactatgagcggtttcatctgtgctagatatacaatcgcccacctgatatagcaaatgaagaacaaaagtaagcaaaaagaaatggaaaataaaacaggacatggctatttaccagttagaattactattgaaccaaaggaaaatgtaatcacaaattaatgaaccaaagttcgtcaactcaaggcaggcatgtttagaactatgaaaattacatcaccaggagaaataaaatgaacttaattgataaagactataaaagattttggtattcccccttttccaaaaaaataaaataaaaataatgtaattcagcaaagcatgtgctcattccatcaaaaggtcattttccctcctcccttaattatgctggacatactgtcagacagcaaataagtagttatatcagagaaatgataacttttcaagcatttgacttcttgattcagaaactactcacaagttttgatgcatttccacttaacatcactacaattatattacagtcaatttaagcatcaagcacaagccaaagcttcccatcatatatcctttggtctccttgtgaaatatggtggtgaacagtcccatcttaggaccaaagtaaagcaccaaaggcatgggtatgcccaggcatgattgcctaaacagattctgattttgaaaagttcatctattcctcttcaattacttttgtttggtactgttacgcaggacacataataattcaactaaaaggtactccaaattcatgtggcagtatcatggtcatggagagtaaaaggacaggtacacaaacagcttcagcagaactgattatggacacattcagccggagaagttattcatttaggaaataaaatgaaaactttgattttagtgtattccttttccaattaattgaataacagcttgctggggcaacaagctcaggaacaaaacttgtacagtgcagcaattccctattctaactccatgaaaattaaaagaacttgcaaatcaaaggtgtacttacatcatccagcagcatgttgtagcagtaagaaccaaagttaggtgaaatctgcaacaaagtaataagatattagttcatacagagaacaataattttgtgagaggaaacattatcatggaaagagatggatgagacacaacaaaattcaaggaagtcattattgaagaatacaaaaaaactttgacacaaactaaaatataaacataaatacatcaatcacatcacattgtaaaactcatcaaggcgacataacagaatcagctattaattaaatagagcagcatatccacaaagatgtttggcaatatcacaattccttcaataacaaatttttccagatctatgagttatgcgagattatgaatttgttatttgtaatctgtgtaagattagcaacagcaattattaaattagttcataagtcccagaaagaaatgaagaagcaagcatagcatacagattagctgaaggtcctctattgaaacaaattctggtacaaagggacgccacgattccaatcactgcgaaaattagcgtggttacagagaaccccataacggatcctaattcctgtgagacacaaacaaaatttgagaacgtgaaagtgaaaacgaaacgacacaacacaacacaacattacatatttttacattaccccttagttccggtaatgcgtcgtcgtattagtgatctgaagcttcttagcaatttggtttgatttgaattttatcacctcgcatggccactgattgattgaacatgattcattatacctgcacgcatatgggcccatcttattccctcctatcctgttatttgggtttcttgggccacgtttatcagcttttgctattaacactccaccatttactattaaatatattctccttttcttaacaaatattgcaaacgcgtggcaaatgaagtacatcgatcatacattcatactcactcttgtatgtacccaaaaaaaagtataacactctcatactacaatgttgcctaaggtggtgctttccaagaaggaagaattgaaattgcacatgaaggtctaaaccaaaacattttccagttaaaaatttaaatttcttgatttaaacttctagatacaaataaatctttaacttactattccaaattttcaagaataaaatctaatgtttcaaaaaaatagtttttactcctacaaaaaattggaagaaagtttttctatctgcatgaatcaaaaaacatctaacttaagtttttaggttttaattttttttattcttaaaaaagattgacatgtattaagaatttacaattcatgaatccttagattctttgattttaaatctcaatttactcttatatattaaaatacagaatttttttataaaatgaaaactttaagtgcattgaatctcaaataagactctgcgtagtttgattttttttattaaaaaaactatatatcaaaaaataatactcagcccgatttattacactagttaagatgttacaatagcatttgacgaaaaaaatgatatgtatgataccaagaacgttaattgacgcattaagagaaaatagattaatagaaatttttaatataaacaattggattcaaattttatatactaataagttttcaataatttcttcaaatactttaaatttgactaaaattttaaaataaaatataaaaataccatcattttaaaacatttaaataaaagaaaatttatagaaaaaatatttcaagacacgtcataacatcaattaaattggtagtgtgtatgtctgtgtttcttttacagcaattaaattgatatagtatgttaataactgatttattagtgattatagattatagatttatttaaattttttttattaatgctttttttactagaattttattattattaatgattaatactctttactttctttcttctttattgtaacatgcgagccaacgagcaagagacaagagtggagcgaaaaacgacgtcgtcgctttccgtaacgatgaactgttaataaacaacgtcccttcatgtgattcgaatccaaccaagtaaacaaaatccactcaaaattggagggtaatcagcttcaatttctttccattttcattttgccctaaaaccctaatttaaaaaaaaaaaaaaaaaaagaccgtgagtgagagagaacaaaaaataaaaatggctatgcttcatcccctcacaaaccgcaacccaaacgagcttctctcactctcatgctcttctatattccaccacaatgcactcacaacttccgtttccttcaactccagaacaacaaaaattgctcctcaatgcctaagtcgtcgtttcgggtcggtgagatgctcctacgcttacgtggataacgccaaaattaaggttgtcggcatcggtggtggcggcaacaatgccgttaatcgcatgatcggaagtggtttgcaggtgggtcaattgggtattgtctttgccacccaatttggaacatcgataattggttattatcaatatcattttttttcaatgctttctatttgtagtgactccaatgctttacttcttgtgtttggaggttataccactttaaaatagttattgttgaagtaaaatagttattagaaattagaatgacagttctatttactcttcttcttttttatcttgattgcacattttagattcacttatttaatccaatgttaatttttagccagcggcgttattctctaagataccatttgtgtttggacaaaacttagatgtaattatttaggagattttgtccagttagaattagagtttcacctcgatagtttgcataataaatgcttatattcgatgtcggcataggttgccaaggtgaaactccaattctgattggagaacaacacaaaagcacctaaataaatgcatctagtttttcgcctttgtgttttgctgccaccaagtgaataatgcagatgttattgttgaattctgcggcattttcttttcaatcagggtgtagacttctatgcgataaatactgatgctcaggcactattaaattctgctgctgagaaccctattaaaattggagaagttctgactcgtggattaggtcaggcactctacttgcatagtttttactatgatgtgatttgtttttgtggctacagtcttgtttctttgctgaatttgttgacaaattgaggggggtggcctttgattcaaattacctgatagacaagcaggtacgggtgggaatccacttttgggggaacaagctgcggaggaatccagagatgctattgctgatgctcttaaaggatcagatttggtatttataacggctgggatgggtgggggaaccgggtctggtgctgccccagttgtagcccaaatatcaaaagaggcaggctacttgactgtaggtgttgttacctatcccttcagttttgaaggacgtaagagatcattgcaggcaggtgtcctttttctcgttatttgggaatgtgactactgaattagttttgctcttaatttaatactaccttctttttttaatatgttgaaaaatatcacttatcttcttcctttgcagtttattttattctggttaaaagtgtgtttggaaattcatcttttgacattgtgttgaaatgaatggattttccaaacacaccatatagtttgttatccaagttatgtgtcatccagtatatataatttgttgtctgaaatttattttatctagcagataagagtctatggttcatctgaaacttgtattttgtcgtttgaaatctagaaaataagtctctagtttgcatttggttttcttcaggcctttgaagccatcgaaaggctgcagaaaaatgttgacacacttatagtgattccaaatgaccgtctgcttgatatagctgatgagcagatgcctcttcaggatgctttccgtcttgctgatgatgttctacggcaaggagtacagggaatatcagacattataacagtgagttgattggcaaactatgtattcatatttttttattcagacactagaacatgatttaagttccttgctgatcccataagatcagctacttgcaaggagaaaagggaaacataaaaagcttgaactattctccccctacttgttccttagtgcttttgagtggtcactggctcacttctccttcataattgggcattgtggctttgcatttatgtctgggtatgtccatgcattttttttctggacattataaactggtgtgccttcttgcaggtacctggacttgtcaatgtggattttgctgatgtaaaagctgtgatgaaagactctgggactgcaatgcttggagtaggtgtttcatcaggtaaaaaccgagcagaagaagcagcagaacaggctactttggctcctttaattggatcatctattcagtcagctactggggtagtgtataatattactggaggaaaggacataaccctgcaggaagtgaacagggtttctcaggtatttaaagattgtcaccacttgcttaagaaacattttgttattcctttgatcttgtgaatttgttgcaaactaaccttataatgtttcttgattttgtgtttatgatttcaagtatagtgctgcagttttttgttatggttatatttttgcattcattttaccttaacatgttaaaaaagttatttattcctctggaattcatctagtcaagaatttcggatagctacccaacctttcactggaagagaaaaaaaaggaaaatatcaatatttccctcaggggtctgtttttcttttcagtttgtgctgtattccgccttttgctgtatggtggtatacgtaccgggttcactcctaccttttcttcgtatttgccttgtccttaacacgtgtaatttttataggtggtgactagtttggctgatccttctgctaatattatatttggggctgttgttgatgatcgctacactggggagattcacgtgactatcattgcaactggcttctcacagtcttttcagaagaagttgctaacagatccaagggctgcaaagctgcttgacaaagtggctgagggccaagaaagcagggccgtccctcctccccccaagtcctcaaacaaggttgaatctagaccatccccacggaagctctttttttagtttcatggttcttttacccttttcatttttccaattattatattgtagtcattctgtagtacaatgatcttgatgcttaatttagtgggatatcattctcttgatgttctttcttcttttcaaatttaaaagcgttagtttgagaatatgttgtgattttattttcacttttaagtacaaaataattaccttattttcattttattttgtttattcaagagtgataggaactgaactagatttaaaagaagaaagaatgaatctttatttgaatattggagaatatatcctgcaatacaatagtgaattcgaggttcaccactctcctaatactttctggattccctttcttcaatcactcacctcctatttatctatttgtgaccctcccacatttagtataactaactaactaaatgtattttactaattgaccctcctgttatacattttgccccacctcctactcctatcagatttgcataacaagttgtaataaaaaacttttttaccattttctagacattctttaaagagtttaatatctatgcaccgaatcaccgtttaaattactttaaaataattattttaaaagttaacaaatttatcatatatgatagattgtgattgaatgattgtgtaaaattttttaccccgtcactatataacccttttttcttatttaaaacatgaaacaaagaaattataatgacatttttgtaattacaaatgaaaggaaaataaaaacaaaatatatccttgaatcgtttttgctagattaagataacaatgaattataaattgaattgaatatgaatatcctcttgttccctcttaccttaggatttcccttcttcccatggaaaaaaacgagggaaggttataattaagtgatattacatcatgatcaagcattgaggaattcttatagttaatgtgtgaagatctgacaatagaatgcatttaaatgtcatctaaggataaagtgataaagttattatttttataagaaaaacgttatattgattctttgaattatcaatgattctttgaatgatcaatgcatttgagaaggataatctagaaaccattacaaataaagttttgaatagctggaaaaaaaatattaaaaacaaaacaaaaaattcaagttaaataataagattaaaggagtagagtaacctgtaggatttatttattgaatttttcgaaattacatcatcaaagaaaaaattgcttaaattgtgtaaaaagaaagggaaaaaatgaaatgttatgatgggatttaagaaatttaacttaagtacctcgttgtggttgcacattaaagtttttattttattttttataactgggttgcacattaaagttgcacgatattaatgcaaatcacgtacataatacttgagcacaatctcacggagaaatgtgtgaaaactcaaccacattgatactccagccagtagcattcactttcatatttgtacaagagaaaaacacacgatatataaaacacctaaatatggcaattacaatacaatacatcgcctttcacgacctcaacaaattccattccattggaaaagtaccaagagaaatcaggaaacctggttatgattctttagtgcacacggcagaaacaaagatgaaaagcagactcttgccaagtttgggtattttattcattacaaatatttgaccaacagccaaatgacaacaaccaaagccactataccaaccactgataaaagcatgcacatgcaggagcaaccacccttggctcgcttatttaaaaccgctaagttcttctgcacccgctgttttcacaacagaaacataaaagataagcagcaagtaaatgtcaataatattaacataatttaaccttgatatgacttaacaagagatttggccccaatgaagtttacgataagagtgttaccctaagccgagaatctgtgacatctacatgttggtctaagtcatcctggcagacaaagacaaaaagaaaagattcagttttagaagggaaacaacaaaccactagctgaggttggctacatagattacacaacatcattcagctcggatcaaaaccaaagattcaggaagaacaaaaattaatgcacaaagggaacatacaattagtctagtgtgtagattcagctcttcattcactgccaatgcaatatgttttgtgcttgccacagtctcttccaattgctcaaagccatcatcttgttctgcttgaatagcaatgcactatcagatccaaagaacagattaaaagcaatatattttcaaacaatccaatcaactgacctttcataatttgccgttgaagtccaacaagtccattgttgtccaggtcaaccgttctggtaattgcatctggttttctttctggcccaaacaaactatccctatttgcaaagtttgacatgttcaacgtggaagccatctgattaacttttgatctcaaatttgaaagcatgtccttgcgacgattcatctccttctcagatctgcgtcaagtcagcaaaatacacttcataaaacaatagtgcaaacttcatcatacaccttcacagctgaattgaaaacattgcctcttctattttaaaccacgtagcttaataaacagcatgacctttttcaatcagcataatcaacaattacacactcacatgggctgcttgctgggaagatttgacaaaagggactgcaagctatcaagcctggtccccaatattgtaatctttctccttatagcagatgaaagacgctgggtttctggtccagatgcaggaaatgaactctgctcagaaatcatgccactgatatcatcagcaagtttcagtgcttcattatattccttcacccatgagtctgaagaagatgccattgacctgaaagaaagaaaaaagtgagagaaaaaaaataaaaacaaacaaatatgatgtttacatcggagaaatgaagaaatagcacaacaattaacaggtggaaaaaacttggatgcggttgtttaggtactttcggtgttattttccaatcataatttaagttttaccatagaaatcataaagcacatgttaccaagctgaaactctaattttaatagaaaaacaccggaagcatctaaagaattgcccggtaataaataaactagaaaggcctagaaatcttcaaaacggtatgggacatgattatcacaagataaattctatttgcttagtacaacccaacccatacacaaatttaccagtacccttgttcaaattaaactacttatctcaacaaagcttttctccatttaaaccagaattgctgttaacagcgagtacgaaaaaggaattgctggtaattactaatttactacaacaattcaagtatgaaagaacagcatgaagaacccttaaaactcatgatcgcacagggtaataataaaccatggagtcatcacgagatgctgatatctttaacatgagctaatttcacaatcagacatacacaaaacgcacaattcaaagaaaagaagaagcagagtgcagttcagaaggagaattgtgttgataaccgaaagtgatcggaattagagtaaagaggggaaacgatcggataagaaattaccctcttttttgggaagctaccactgctgtgactgtgaggaagagaaaaggggtgatggatgcgacgtcgttttaggaaggtgccgatggcgatggatgggatgaggcgtacggcgccacccaccaatcgtcaccgtcgtttacctcacgggattgcggaagatgaaaggtttcgaataattcattcaccacgacgtcgttttaaggtgtcattttcgcgagcattttctctatcttaggaactaggaacacataaaaaaaaaattaaaaataaatgtaactttttctggagttcatgtttgagtgttttatttatttattttggaaatttaaatttaaaaaaaataattttttaagttttagaaaatgaatatttaattttaatttatcacgtttaaatatattttaaatttatgatcataattatgataactacttattcaacatcattatcattatcattatcattccttcacttatttattcatctaactcacttaatatctttttattaattaatatgcatagcagcagtattacgcagaagagaaatgtaaaaaagaaaaagaacagttgtagatttttaggttttacagggtagaatacttttgggacttgggaggcttttgtaagggtggggatctattgatcttgaacacattctatctgtgtcaagtatgtcttctaataaaatgtttagcatttaaaagaaaacaattgttggataatgtatgaatgtattaaaagatgttatgattttaatttgttggttgaattaataatataattgaacttgtcaaattcaaagatatcaccagaaggagtccatattgcaacaagttgatgcatgcacaacaattgagtccccttgacggacaggaagattagttggtttccattccactaagggtaggcaaagttgtccgaaattgtctctcgggcacataccatacccgaagcctccttgttcatcaaagatagatgaatttgaatataagttaaaagtgtttttgagaatttttctactaaaaatataatatctttttcaataaaaaaatctttcaaaagtacttctgatttgtatccaatcaggctcttagttcctcttttgccagagtatgctctcgattttcaactactttcttccgatcatcgcctgtccacaatctgcctcgatcgaggtttccatcacatcctatcttcactgtttttcattccatccttgccagatgctccaaacaatcatcgcaaaatcttcaacctctgatgcttttctagcttcatcattattgagaacgcaccctcatattaacattagtactctgattccttatatccaccaaaattaatcataacattaggtccaaaattccacaaaaatacatgcatcaagaagttcaaattataaattcatcttaatacaaggcaatcaatctcagtttcaaacacatttacaagatttctcttcataaacacaactttaaattattccgcctatgtccaataagtaaaaaaacataataaaaagaaatattattcaatctcatgaataaaacttacaaaaaataaaaatggtcaattacaaatattcaatgatcacttgtctttaaaataaatgttttttaaaataggttactagcactcattaattattttttccctatgataatagtgtaaaatattattgattttgttgatgactatgttatattaataaatcttatttatcacctttattagaacctctttattcaatcacaattttatctacaagacttaaatacattgcttaagtggtacaagttaaattttactcataccaaccacattttagttaatcactatgttctttgataaacaagtgcatgacttagactttttctataaaaaaattcacaagatgataattttgtcagattttctctctctctctctctctctcttaactgtaggctcaaagccaaatttttatcaatttcattattaaaatatcaagtaattaatattgtatttgatatgataaatatgtgaaatacagtaacatcacaaagtaaattttcttaggcatgtttggatgatttttagttattagtttcaatttttttaaaaagaaatgaccaatttttatttttaggttttttcctcaaaatttaaattttaaaataaattcattttgaaagttttatatcctattaatattaatttaagattgattttatgtgataacggtaacattaatgatgataataatagtagcggtggtcatgttgatgtcaatgacaatgatgaagacattgatccatagtaacaataatattagtaatgacgatgacacaacaacactgatggtgatgatggcggcacaatgaaaataatcattatcaaatgtagagaatgtgtgattttttaaaattaaaatccacaaattattttttgttttgttttgaaaataaagatgagtaaagatatcaatttcatttttaccaagcatttttgttttaaaaatcatatttaaaaaccaaaattaaaaaaacacaccacaccgaagagtcttaattatttctgtgattaaatttctgtgtgtaaaccttgacgtcgcatatatattatagactgttaaacgtttaatatttgtaaactttaattgacatgctatttctcaagttcttcaaaattacatgctggtgtctttgcatgccattttcttatttttcttttctttaaagttactactatcaaatacacacacgtgtgtattgagatacgatttcctcaccacttaaaattaccatcaaacacacacacacagagattacacttgttacatatttctaatttcttttgtattttttatatttcttttgtcttttttattgcatcacattaattactcacgtctcttctattttcttctctgaatgcccaagagatgacaccattttctccccatatgtatttgttacttgaactctacggtttgtaccttgtatgcatggaagctaagtagaagaaaggaagagtttctatttggaactatatacacacttggaaagtagttatatttttcttgtgggtgttttctgattttctcattgatgtgcatggtcaagtcattaattagttccgtatggttctttagctaagctgcaacttgagggtttaatctaataaagacttgagcaattttttattaatatataagtacgaatgatatagaacttaagattttagtgtatattttatgatctttttttattactgcaacttaaactattaatcattatttatgttcttcattcaattatcaaaagaaaaattcaatcattgtgtcattatatatgctcgtgtaaaagttgctataaaggttggatatacatttgatagtattgtcattttctttatactaatgcttatacagcgagaagggcatgtcgacagacaaaatacctgtatatagttctattattttagtgagcttattttatttcaatgtattggtaactttgtcttattattttagtgttactcatccataagaaattcaaattttattagactcgatttcaattaatttggtatctttttcaaatcatggatacaagctaagtacaggctatgtaataaggtttgtaattcacttcatctctcatcttattgatttggtttaaataattccaaacaattcggaagtgttttttttttttttttttttttttttttttttttattgacgacttcgtagttgtgatgttaatatttttttaccacatcaattaataatattttccctgattaatagaaaaataatttgagtttaactgtcatgtattatcagtataatttttacactattatataattaataaaaaccaatatattttatttttacactattctataattaaaaaatcaatatatcttttaacgtaattattttaagatcaaacttagcatatataataatacgtaattgaatgacaatttttttacactttcagtgtattataataactgcattcttaatattattgaataatttgtataatcttaatattgtccactaacttttttagactaccaaagtaattcttttagtaatataataataatatgattttaagggataataataatatgattaaaaatctatttgtatgagaattttagtcaatttgttgtcaaattaaataattttattgtgatatatctacatttcttagttttttttattaaaacttcaaataattgtttgatatatcatgttttcaaagtgtgtttgtttgcgcttcctttacatgcctttttcttaatttcacatcaaaatacattaaaaaaaacatgaaaactactatctggggtgactctggtatggatcatatataattgtgataaaaattatggtgattgtgaaacaacattaaattacttcaatttttttacaggtctcatcacgataatggttgttcattgtggttttactatcaaaccaaacaccatttatattaaacatcagacttagacgtacttaagacctactaatgcctaaccaaacactcagctatcaacatttgattcttggttgcattttaaaaattattgacagctgctttttcaatttctagttgcatgtgtgtaaaaagaaatcaagtttttttttttattgtcaattattttgattagaaatacagtttcgaacaatgactttaataacctaaacatttattaattattacatcaaattttataaatattggtttaccttatttcaaatatttatgatttattttaaaaaagatattataaagttatattttttttactgtaatagaaagaaaatattatcgaaatggtgcgatatgactagcgtcattaggaattcaatttcatgttacgaaagaatatttgttaagaaatatagtaaagacactagtcctaattcttggtcataaattgatattttttaagtagagagattaatcttgatttgtggccgagagatatgcaaataaaaacaaaaaaggtagagagggaactaaaaagagtataatatctgatgcagaactctattaaaaaaaaaaagatgaaaagtgagtaatttggaaatatattagaaaataaagagggtgattgcaaaaagggaaaagattgaagcagtagagaagagaagagaggagaggggggagaaggggttgcagagagagagagagatgtcatcttcagacctggacaggcaaatagagcagttgaagaggtgtgagcctcttaaggagtctgaagtgaaggcgctttgccttaaagccatggaaatccttgtcgaagagagcaacgttcagagggtcgacgcccctgtcaccgttcgtcactcttttccctttttcctctttctgggtttcgatttacttatgatttcagctcacgtactaaacaaaattacctcgttggattttagttcaatacgattagttagttgataactactttacttgggacttcaatctatatagggcttgttataaatgtcatatatagtgatgagagaaagcttaagtgtcattctttcgaggggatttggtgttttttgtgtctctttattttgacctatttacataaaaaaaacgttgttttgtgctttgttctgtgtccagagtgtcatgggggcacacaaaaagttttttttttcttttattttttttctattactgtgcatttggggtctactctgctgtgttcattcttctttatgatcctgcttctggtttttgttgtgttcaactgattagttttgttggttgtcttggtctttgtgtagatatgtggtgatattcacggtcagttttatgacatgaaggagcttttcaaagtaggaggggattgccccaaaactaactacttgtttctgggggattttgttgatagagggttttactcggttgaaacgtttctgcttctgctcgctcttaaggtgataatttattcttcttctcttataaaactgcaagttagaagcatcttctgtggtttatgtgtttattttatgcttttttttctgtatgttagatctgttttgggtgccttttgacaatttaaaaaaacgtcccagtcagtttaatctatgattatcacagaaatgtggttggtcttcgatccatgggcttggtggtcactgcatttattgtctttgtgttaactttttaatttttttttcttttttgggaacacattttgctactgttggaatgaaattctacaagttttttctatgggatagtgtgagtaatgtaaggatgctttgttattggtgatgctttattaatctggtctggtactaaggttttgtcagtaaaaagtagaataaaattttgaaatttttgcttttggctgttgtttggtggatttgaatacactgaaatttactcagcagttttgtcctttcaatctcgtcagacatgattttatttgcttgctctagggactcgtttgtttataatatgaaggactactctttccttttgagcttatgttattttgtctatgctgttttctttaatctattttctgagaggatgcactgtcctcattctttctactttgtctcttgatgaattctttttcttatcatttttctaaaggaactaaagaagaaaaacaaaagataattttattttttttacttttgactactaggttctgtcagatgttgaactactcattctttttgtgctcttaatgatgcttctttcattttattcgttattgttgtaactaattaatgacatacaatcaggtgaggtatccggatcggataacactcattaggggaaaccatgaaagccgtcagatcacccaggttagtctatcagctaaattagaaaaaagaaataaatcctttttgtaaacatgatgaagaaaagtgggaaagacactaaaaattttcccaacattttatgactccagattacttattcaatatccatcacttgacaggtatatggattctatgatgaatgccttagaaaatacggttcagtcaatgtctggagatattgtactgaaatattcgactatttaaggtttgctaatatctgatagatcaccagatttgagtattgcattgggagctacttctccttaaggatgctttatgtcgcttgtctttgtttattttgaaagggaaaaaagtttgagagggtgcttttaaaatccattgattggttattttgacaaccttgtctaataaatgtatagactgaaaatgctagcaaatatttaatactcttttctcaaaactctttccattattaagtaaattccgtgtattatataatgggattcaattcaataataaagagagcagtattgtcaatcttacctgtaggatcgtatgatctacttgtgtggctattctgtgctcttgattagatgtagaattgtatgagaatgggattacagtgccaggtcacgagcttgtggaatgatctatcctcaacgagttgcagagtgtgccgtgaaattgtgggttaggttttatgaactggtggggaaaagattatatatttgccctaatctctcccctttttcttcaagtgacactccaatcaagcgatctccctctattcgaacttgtctctgccatctattctctatttcaagctcgttttggcttggcttacctgaaattgagaattttccgtgttttctctttttgtgttcgaccttggtaaccatacttatcttcagtctctgttcttgtttggaacccattttgacttgggttggaatgtttctctgttctgatctttgtagtggctagtgattcagtgttgagtggttctgttctccgcatcttgttagagcatttctgatttcaatctgatcgtcttccctgtccttaattttttggcttataaaagtagtgaattgggcttgagactggcttctaagtccagtacactttctggtcccccctcccccgatatcattatcaaatataaaacgagatgcattattactaataaagcaattactacaaaataaatatccgaattgttatctaagtcttgtggtattattacgcgtcttaattaattacattatcatacttttatatttttggtaggattttttaatcctatacaatcacatggtttatgatctttcatcacttctcgatcctagatagaatctctattttaacaacattcaggagtgttgaaaaaagtgttaaaatgcaagtgtttctcgtgcatagaaatagccaaaaattaagagacaagaggtataaatggaaacattctgtgtcaagttgcttgtaagacaacctaactgcatttacagatttaattggtatagcttgactcttccactaatagtgtcctatgtcgataacggcaaactgcagcttgtccgctctaattgaaaacaagattttcagtgttcatggtggtctttctcctgccatttctacactggatcaggtcaggaaatttaccctaatttgtttgtttttgtttagattgtacactagcaatatttttatattatttattgttaatatttagatacgaactattgatcggaagcaagaagtacctcatgatggtgccatgtgtgacctcctatggtcagatcctgaagatattgtggatggctggggtcttagtccccgcggtgctggttacttatttggtggcagtgttgttacttcctttaaccactccaataacattgactatatatgtcgtgcacatcagttggtaatggaaggatataaatggatgttcaataaccagatagttactgtctggtcagctccaaattattgctacaggtacctaatccactaatctattaaaatgatttttcttatttgtgttctatgtttttagtaagacattttcatctttgtcatagatgtggcaatgtagctgcaattctggagttggatggaaatcttaataagcagttccgggtgtttgaagctgctccacaggtttgtaggcaaagtcacctgatatttattgccattatgaattcgtacgcagagtgagctataccatttttctcaaatagtagcaatacgagcttcaatctctctatctaggtggcttacttggtggtcagctttgacatggtgcacgtggaaccatagaaataatatcctgtttcataatgaacctttcaatggtcacaaactcttggaggatgctattttcttttgctggtcttggttaaggagcctagaggaaggctttgacactcctttccatttttggtctactaatctcagccattgttttctatcttgggggggtttgtctcttgtattttgatctgatctatttggcggcactgagagaacttcgtaggctttttggtcttttaaagccttcaaagttcttttctgatctcgcttttctgtaacttcatcagtaccccttgtactgtgtttatatatatatatatttacttttgctgatcaaaaaaaaaaaaatgtggttaagaatgtgcttttcatgtgaccttgggttcagtactataagaatgtgttttatcccattttgtttacttatcagtttgttttcatttggattgcactatctttgcatgtttaagcaaacaattggtgttccttgttcttcgcgaacatatgatcttggggaaatttaattgtgaaatttgtcaattgattttcagtttttttaattttaatggaatgtaggaatcaagaggaacacctgctaagaaaccagcaccagattactttttatgaagtggatttctttgtttctataatctacatgctcaaattattgtgggagacttgaatcaaggagatgatgatgtctgactcgggaggaatcagtgaaggacaaatcagttctggaggcaggagttctgcatcccatccgtctgcttcaaccatctttagtatcatagcagtattgtgaatttgtatgtgatttgcaatatgttgttattacctttgttcattcaaaagctgtgatggacagagggtttagagggaaaatgacgtttgcatatatgaaaacttgattaggaaggattggattggaatcagggaatattgggaaataactttccaaatatataatctgtggaaaaaacccactggttgagttttgattataaagtttgggccataaaattttgttatcttcaatttatctattacgtgtaaatgtattattgctcaaattttacacctggtggttggtactgaaatattgccatgcctgaatttgaatttgaatttgaaggttcacttgtcaaagaaagggtcctctctctattaaaatttatcggaattgtttctttccatattttataaattttcatgagctttagtgttactaatccacaaaaagaatatgggagcacatcatcaatatttttaattcaagttaattagggtggatgatagatttaaaattaattttgcctatcaaatcttaattaaatttttaatttttaaaattatttttcccttaagttaaacaacttgttttttatttaaattaatttagaaaaaatcttaaaaaatacacaagagaaacatatttttattgtgtgaaagggtagcagtaatttattgagcttttgctgaagtgtaaaatgcttgaagcctgagcagacaagaatgtgtgagaaaacctagaatgcaaagctcatgactatgaaagccaacttaactaaatgatgatttatcccagttcaatcatgcaagaaagtttaactttcattagattacgttgggattggaaatccgagttattgtattttttttagccaaaagtctgagttattaaagtgtgataaaagttgagtaatattttaaaaataaataaaaaattaaaatatgattttggtttatctattttatttaatatgcaattttgatcatatattttaaaatcgagatattaaaattttctattttagaaaatttataattttggtaaaattttcaattttatttatgttttgtttattttattacaattaattgaactataaacttaatatatttatttatggtattgtcaaaaataatttaattaatcaaaatataagaaataaaagaaattaatatagacaaaattgaggatttgttcaaaattataaaatttttaaaatagagaatcaaatgtttatatttaaatataaaaaactaaaaatgcgaatttaataaaagaagaaatccaaaattacatttaagctataaataattcgcgcccctctatatgaggtgcatgtgtattttcaattattggttgttatatcctcttattttatcttgttacggtaagctttaaatctcttttatattttcaagacattaaatgtatttagtttttattcaatacttaccgtataaagtagcatgatgatagagtagaaggatacaacattaatttaaggcaaaaatataaaacattttttatttacttagttgagttgtatgtacttgtacaagagtaaagttaaaccatgtaggttcaagaatgggaatattgtaaaataatgcattttcaaaagttaaaaactagaacatttaaatatatttttgttgttataagttagtggttttttatttttggttctttctatttttttttttaaattttagtttctgcaaattaatatttttttaattatgatctatgtaagatatgttatttatttatagttcatgtaagcatgaatttataggaattataaataaaaaattaaaatcttaaagtgattaaaattaaaaaatgtaaatttataaaaattaaaaatgaaaatagaaatttataaagactaaaaatataaaatgacaacttaaaacttaaattataaaaataaactcataagaaacaaaaataaaaaaaatactaacttacaaaatcaaaaacatatttaagtaaaaatgaaaacttacaggtcgcgtgggtctcgagctcacatgtcgttatattaatcaatgatcactactatgccatctccatgttaatttaataatgatttttttaacaaaaatccaaaaccaaccacttcttgctacgtctccattcacagttgctgttcctggtcgttgtttgcaaaaattcagcttcaatccaatacgatataattcattattccacatataaaatagtaagaaaacttgtataactgtttcccttggtatggtatttcatcatatgggtgtgtttaagttttcatctttcactggataaacatgaagaattaaccatgctctagtcaaaacttgttttgctcaagattcaataacttggtctgcttaaagatattggcttgatccctcacacctgcaaaattgaatggcaccctcaatttgttttcttcttctatcccttctgttcctttcatcctccacaagtggtgatgaagagggtttcatctctgtggtcatatctgataaaggccttgattttgccaaggatattctgatagatcaagctgttgcctctattgttcagtctcagctgccacaaattgagaagactgtgcaagtccctcttgttggaaaagccaaagtggttctttctgacatcactatcaatgatatccaagttaattcttcatctgttaatactggagagacaggcattgctcttgtcgtttcaggtgccacagctgacttgagtttgaagtggaggtactctgttagcagttggttagttccaattggaatttcggacagtggaactgctactgtaaaggtatgaacctagaatgttactttcattttatactgcatactataacttttatctttgagtaaatagtttacatactaatagtgtaaagtgttttataaaatttgttgacttttataataactactttaaaaattatattaaccatgatttctgattggttgattgtaaaaattaaactctttatctttttgtaagttacaccgatttgcttggtggcttataatttgctttgttgcattgtgttttaattaagaaagtttgaccttgaactaaataataaatgttttcctgaatttggttatttttataaaaaattagttagcctggttgtactactatggaagctataaggaggttatggttgaaattgcattttcggcgtcttgcaattggagtaagaccaacttgttaaggcataccaattcagtataattgaaactagggaatggagatattaaaaaagaaagaaaaagatgtggtcttgagatggacaataaaagacatgtatttcagtatctgatagccaaaaccctgagtaatgtacttttgtgcaaatattttttttttatacctgtttagtcaattatattcctcattctatagtgctgtgctatgttggaaggttaatgatttgcaagtgggacttactgtgaatttaaggaaccaagaaggaactcttaagttgattctcctggattctggatgtcatgttagagatttatctataaagttgcatggcggagcagcttggctttaccaagtgtaaggaaccttcttaagccatggtttttgataattaggaattcttacacatgctctatcttagacaattatgttcttttattgctgattaaggcttcacaattccatggggaggcctttggccaacagctatagtcccagatctatgtttcaattttactccaatacttcaatctttagtgtgggacctgaaactgggaggccagataagagtgtttccgttatcttctgcaacaaaaactattctggggaatataaagctatatttctatttttttgcaggctagtagatgcttttgcaggaaatatagcatctgcagttgaagaggcaatttctaagaaaataaatgaggggatatcaactcttgaccttttattgcaatctcttccaaaaacaatcccattggacgaaactgctgctctaaatgtttctttcgtggacaatccagtgctgagtgattctgctattgaattagaaattaatggtttattcacaggaagaaatgaagttttggtacctcaagcttaccgcagaggatcagacctttctgcttcctgtggtgacagttcaccaaagatgataacaatttcattacacgaaagtgttttcaaatccggttccttggtttatttcactgtaagtttctgaagtttttagccttttttttttcattgcttagtccaataaatggagttttctcttttcccccttccacttttcattttaagctatatctgtgatgtataatagcatcatattacttgttgcatttcttccaccgttatatttcaagtgaattgtaatgcattagcttgtttgtttaggctttggcattatctagaatctgcagaagaaacaatttctttgttgttccacagtttgcatgttttcttgcatcatttattcatacatattagtggactgagttctttaatcgtttaggttggtcatggaaccttttgttggaattgctctaaatttggaaaaaagtattacttactgacatcaaatagaccttgtattgcagatgccgattagactttatgtattaattgggctgatgctttatgagaaaaagattaaaatagtagtgctgatgttgattaggctttatgtatttattgggttgctccaattacattttgcacttcaagcttttacgttatcataaactgaaatataattttgatagtttgttgttcttgtgctcaggcagatagtatgcaatggattgttgatgaactccctgatcaggcccttttgaacactgctgaatggaagttccttataccacaattatacaaaaaatatccaaatgacgacatgaatcttaatatctctgtatcttctccaccagatatacaagtgacaaacaaagatatcggtgtcaacattttcatagacataacaattgatgttctggaagatggtgaagtcatacctgttgcatgcatctcggtggtatgctttaataaagtcaatattgaagtagatagtttaaaattttatgaagcttacactgtttaaatagccatccctcataatatactgtgtctgcattctgactaagctatatgaaattcaagctttctaccatttttgtcatcatgttatcgcgcgcgcgcgcacacacacataaccttgtattgatcttctgattaaattttcagatttgcctacttttttttgtccatgcctaagattatactatttcttaaaagttaattattttgtagagtttaaagaggtagccatgacacatgatcattatcttgtttaacaagtccattaatctttgttattggtacaggattttagtgcttcttgtgctgtggaaatcgtaggaaacaatcttgctggttggcttaaattgagaaagttttccacgtacttgaaatggagtaaaatagggaaactgcacatgaatttgattcaggtatattggaataaatgtattcagctttgtattttgatatgaaattgaacaacaaaagccttatcccattagtcagctatatgtattatatgacaccattcggcccagttaaagaccaaaatcttcagagatatcattcgtcatgagatccttttgaacaactttctccaatgtccttcttggtcttctcccctcttcttcataggaataaaaaccatgcaatctactctcctaaccagtgctacttctagtggccttatttgtatggccaaattaccttaactactaattggatgaaatttaacaatacgaacaaataattccttctatttttagggactattctagatcaacccatgagtgttttctgtttcaattagagagaccacagtggtatacaaacttgattcattgtcatgtgaaatgcgaaagtgacacagttgccaaccatttgttaaacatatatgatatattcaaggtgtccggtttatgttttggtctatttccaaaatattacaaatgacaacactgccatagtttgagggaagtggtagacatgcagtatctttttttcctggcaataatttaataagcggataacgtgtaccaaccatcaagaacttttcaacccatttacaacctttagcctttcatatttcactttactgattcattcataaatcaaaattctgcacatggtttagcacatatgtaactccacctcatgtgcacaaccactccatttatattttgacatatatgattgttaaaccttagtgattgtatatcgaggctattatgttgaatcttactctttaactgtgtaaacatttacagtcagtgacatcaaccgtcctcaagaccgttgtcataccatacctaaactcgcagttattgagaggaattccactgccaattcttaatggttttgccattaagagtgctcgtatattgtatgctcccccatggattactgtgtgtagtgatgtttctttctcaggagactactatctcaaacaactaccagcttatgtatcataaacatgctctcagatatctgtctgctttgtgtactaagtggtaataaggtaatgagcaacttatcaagatggctatgaagagtgaatgacatgaacattggtgtagctctggattttacctattgtaaatcatgctgtcctgaagattacatggaaaaactgccaatagtcaaacgtccttattggatttggaatgctctgcaggttctttatttttttaatcagggattggtatttttatatgtaaatttgtgaaaataatatattaacttttgtttggatacatcatacataattaatatttttattttcccaagtattaacaaaaactagttttttaaaataaaaacatttatttcttcactactatccaatgtgcgaaacaactataataacagtaagttggaacatagatacatttttcttttatagaccacgtgtatatttacagaaaacaatcttgttccagcttaataagaaatgcttcttagcatacactttatatttacgatttcatattttgtatggcatcgtagattagatgtcttagcatgtgtgatgtcattgtttgctctggattatctttgatatccaagtgtgtgttaacttagaactccgaaaccttacttttgagtcatgttaaatgcaatctcaaaccagtaagatttttaggtctcaaattctcaaaagaatatacgaataaattttaatttcatctttaaccaactttattagaagtgcattaagaatatctcttttgcctactaattagagatttatcttttttcagaaaatgctagattatatggagatatttgataataaaaaaaatgaatgaacattgagtgcatgaatcatactaacattaccttttaccttatctggaatatctataacttgatttcaatgaaagtaactttaacttgatctcgatcaaagtaacttcagtttaatattaatcaaaatattttcaactcaatgttaatttgagtaatttcattgtccttcgttagaatatttttaacttgtcatcggctagagtattttacatggatggacaaaacaaatcacaaataaatgaattcttttaccacctctaattttgacaaattgagttgtcaagtcaactcgaacgtgtgtccaccttcaactctcgtgataatgtacatgatttagcaagaaaaaggtttatatttggttacataaaaaaaagggggaggtgaatttttaaatttaaggcaaatagagtaggggtagcattaatccacaaggccatgtggaccttttgaccttataggcttttgaccttttaatccattttaatttgtatgaaaaaaaaaaaaagtttattcatttcaatttgtcttcttttacctctatttatcttaattaaattttaataattttcaaaatgaattactattggtgaaaaaaactttatatctcaattgaaattaattgttatataaatctgaaaacaatttatacatttaaaaatattttatatcttaacatttattctatacgaagtaaaatggtaattaacattatattaaatggtgatctggaaagtggaaactcagtgagtcgcgttacgagttgggtggggaggagttaaaatagaggttactattaattagccaaaagcccttttatttttgtattctgtgggcgtctctctctcctcgctagggatcgctctgatcagccatccaaactcaactcgttctctttctttcaacacaaactcactactcactacctaattacttacacgccttcttccatctcatttctcaaacacacacacttacccgccaaaattttaattaacccttccaattcaaacctctttcttttcctttccctctcttcctctctctctctctctctctctagggtttcccctcccatggaggaggccgtctccgatccccagccggagctggagcagcagcctccgcctcttcagaacggggactccgacgagcgctgcgccaagaaacctaaattcgaccatggcgcagaattgaagagagtggcggagattgtgctggttctctccaccatggccacggtgcgcgcggggaggaagccctccgacgccgaggtcgagctcatgagggaggctcgcgccaaactcgccagcctctgccagggtttggctccgaaggatattgtcgccagggaagctattggcaccgtcattgaggatctcggattgaactccaagctcaaggaccagagattagggtttcgaactcccaagatgtccattgccgagaggtattcccatgctaagtggaaggtaaccaaccctctctctctctgctcaattaacactcaccatgcttttgacttgctcattttgttattcagtgaacatatatgtagaattaaaagaaatatcatctcgttaagcgagctgctcaagttaaaatgtgtgtgttggttgttttgaattatttgttatgataggtgcttgaggaatactattatttctatcgtgattgttgtgaatgtgtccgagttaggaaaatgaggatagcagcgtgtttggatatgcatcccgcgcgtgtaatttagaagcaacgacgtgtggcttctacatttttcttcttctcaatattgacctgaaaacgagcgtaacgtgtgtagtcaatgcattaccaaacatgcactaagaatgtagtgttcctagcactacgaaattcacctgattcttatgcaattgttttgtatgtttttttatggaggaaaaaggaatccttggccagattattgtatactaatgagctttatttacttggcttggctaagctagtattggattatttttcggttaattttgtgttgccactcttattgatcataaactaccttctcgagtgggctttttgttgagtttgttggaatgttgaactctgttaattagagaagtattttatttcttcacgcacaagtaagagcattaatttatttataatatgcatgttatgctaagaatgatgctatgccatttcttttggttagttttttctcctttattttctctttatttactatcatttttggttaacagatggaagaagcaaagaaattttctgcaccttctacaccttctacaactcacacctctcagcccttgcaaacaaacattggtggaccagttgacaatcgtgtgccatcacatgttcgaatttttccttctgataaatcaagccacccatcaatcccttctatgggtgcggtagtgtctattcctggccatgtttctgcaggatcttctgcagcattgcagtatcaagtgatcggcaatgaagtaagaccaccagtggtttctggtgtgatgcctggcagtcacttgggcagaaattcatcttccttagcattgcctaaagttgaacacccgcagttcaaagttgatggaggatcaaatgggtctccttacatgctgcaagtccaaggtattgtcctctgaagctcctcactggatccaatttccaaggactggtggagttacatttatgattgatgaatgattgacagtgcaatatgtttacattgaatgatagaatgtgaattgaacacactgatatggattttattttactgtgaagcaataaaacacataacattaaatgaatgttcagaataaaatgctgtaattttatggatgaatacttacaggttttattcaatgttaaccatggagtgatgcgtgatgaattttgaaagttgactgaattggtgtatatctaggcgaattggtctattgtgaggttattgaatagatataatctcctagcagatgttgctcccttttccttgtctttaaagagtctggaattaaactacattcatttgtcatttttctccttcaatctctgttatttgtatgtaactgtcatggaaagctggcattaaggttttaactatctattggcattttcttctctttttttttttttccagctaaaggtggtagtctattctctattgtatctttataatgtgtatgagtgtatcttatgacattttagtcatgaaattggaactggcaactgaatgttagaactttttaactgtagcaaatttatcagcaaaccaacctttggtgaatgctccaacatggtctatacagactcaagctgcttcattagctagaagtgcatcagaaaacaaggtgcctgttcagaattctgtcaaggttgaaggaacacctgatgtaactgtatcaagggcagggccacaattaacaacagacccgagctttagaccatttatcactcaaacagccactggaactttacctagtgtgcaccagccattgcaggccacaaacatagttcagcctcctttgattcctagtcatactgacattgctaagattgttcagaaagtgttacaaccaaagcttcctgtccatcccacgtggactcctccatcaagggattatatgaataaggctttcacatgtcagatgtgtgagctcagtgtcaatgaggttgatactgtacttctctgtgatgcttgtgaaaagggatttcacttgaagtgcctgcagccatcagtcttgagaggaattcataatagagttgattggcactgtatgaggtgcttgagtttaagtgggggaaagcctttgcctccaaaatatggtcgtgtcatgagatcctcaaacacatctccaaaattgccttctaatacaggaggcattcaaccctgctctgagaagaaagtagagaatgtagatccaaaggccatcccacagacgttagcaacaaatgggagctctgttcaaactgtttgcggtggcaattacaatgttgagttgtcatctgaatcaaagataccagataccaaagatatgcaagggactgacatttcatccaccattgaagctattgataagaagcctgatccaaacaactctatgaaatctcttagtgcagcttctagtccttccccttgtttgataggtgaaaattatgttcaacaaataaattctaaggttttgactggtaaagagacttcggtatctgagtcttttcctaaattatctgagccagctaaatgtgaaaatttgcaatcatcacaagattttcaagttgaacatacaatgtcacaagacaatgctcaagtatcatcagataagcatgttgacagtaatattatgaataataaacagaaggaatttcgtggaggagaaagtttaacttatgatattaagcgtgatgaccaagatgctgcacttgcaaattttgttggaacttctggaactaatactgatggtagacagcactctgcattatcttcagatagttcacatgcggtagaatggattggtgatgtagtacaactagtagatgagaaaaagtattaccaatcttgttgtattgatggagtaacatatggactgcagggttatgctcttttccccaccagccatgggaaactaactccttctaaactccaggcaagcaaatcatcatgctttccaatatagtctagccgtcggttatgtcatacctgtagaaatttatctgaaaaattgtgaagtagatatgaataacaaaaaagttgtttttggtgtactttactgcttctgttttgttttgattgatttgaacccttgtgtggaatgttacttttataaatttatagaacttttaacatagggatttattccatttttattttcagtctatgtgggaagattgcaaaactgggttaaagtgggttaaggtgacaaactgctactttcctgatgatttgccagggaatattggtcatccgtgtatatctgaagtcaacgaggtatttttttttttattacatacagctttatatataaaattataaaaaatagatgtcttttttattagatggatataaatacattcatgcaagtgtggaagtttgtcattggtatgttaactatcagtttttatctaaagctagattggcttacatgcacttatactccataaactgtttattggtttgaacttgtaacctatacagttaatttctattttgtttgatattccaatcaaatgataatgcttcacatcttggacatgctcaccattcagaaccatatatatggatattttcttatacatatgttttctttgttgaaggtttatgaatctaatagtgatagaactgaaatggctaactctattcgagggccatgtgaagtcctctcatctgataaatttaaacaagaaaatgacaggcgatgtcagttaggaattgaggaaacttctaaagtgcagcccattttcctttgcaggtttgtttctttatattcatccatcattctagagagtttttattttgttttgtttttcttcgtgcctgtttcattcaatttatagttttatacaattttcgtatttgtaatgcagccatcaagtagaaaatatgattacaatttatcgcatggtattcttggtagaaaacagggagatgaaacaaatagctgagtatgaaaagggagataaaatgcttttaattatcgtttaggcttgtcattggtggtggaaaattggagattgaaacatattttcatgctgcttgccaatatgactgagcattaagaatatatcatgcttttctattttgatttcaatttgatgaaattttggttcaaaagggaaaaactccgtaatttttagataattaccttaccaggaaaataatgaatacaagaaagcttaattgtcaattgaacctggcagacaatcacaaacaaggactttcatgtatatgatgaaggaaactcccttcattctcacgcaaacccttgtaatcaatcttgcgaccaaccccagatacgctatagtgggtaggatagcacattctggaagccaaagactgaaatgaaagggcaaagaaagaatagcaggccgaactataattgcagtcaccgcagaagagttgtccctgctgagtgagggtggggggcaagagaaaagagaaaatgacgtctttatagaagaggagggtgttagtgtcattgctgttgaattgttttttttttttttttgggggggggggggtgggtgttagtttatgtatgacaagggtaattgccatttgcacccttaaccctactcccctaaacaacactactgcaggggcaaaattgggttttgaaacacatcacaattgtgctttaattgcacgtgagaatcttgcaatttggttgtgacagatttgacccccaaaatgccacgcaaggatgtggctgtagtgcccagcggctgctctgcggtgctatggtgtcgtattaattaccttggaaacaggcggaatgtggggaagaaagaagagcagtctgcactgtatttgcagtcgctcggagaagaggtcatctctggtgtgggtgggtgggcaagagaagaggatgtcttttgacaagagaaagaaagaggatggtgttggtgcgttgctgctggggggtagttttttgtttttgttttatgcatgaccagagtaaatgtcattttcacccttaacccaccctcctcctaaacaacactactgcaggagcaaaattgggtttttgaagcccataacaatcgtgctctgattatgcgtgaaaaggttgtgatttggctgtgaccccaaaaatgccatacaacaatgtggccagcgttatcaattgcggattgtggaaaatggcggaaagctaataatctgctatatcatttagcggatagtgtcacaggcaaataacaaaagtcacagtggttgaattatgatatatgcataaaaataagttgcatgcaaataaaaaatatgcctaaaattgacatattataaattcaaaagttcaattggctggagactcaccgaagatgactagaggatacagggttcatgcctcaaccacaactcccatagctgccgcaatagtggatggagtcatgattgtggatccaaagaattccataacgcaaaagcactatagtgctgctgtagtggctatttaacaacactggatgtggctgtaatgcccagtggccattctgctgctattgcactattaattaccttggtaacggcctcttttgataacaacattggttaacctactcatctcggaaaacattacagggctaacaagaccaacataatccatgagtctaatctgagtactttacttcaactggccattaacaaaaagagatacatatgggctaacccaatagatacttcgccatatttggcattcagttagtccaagttttaccaaatacgtggctttgctagtctatttatttatgttctgatgaagttatttcataagcttggaatgcaaataaatgctattctatttcattgctgtttctttgtttcttgcatcattttgtgttttatatgcttaactactggttttgaaatcaaatattgaattcatcgtttaaaggttcataccttcactatccgactaccagtgtagctattataatctactggtatatccacactattattaatcaatctggacaaagtctgaataaatcagagttgatattttggccttttcaatttttcttctttttgtattgacttttgaggtgtctcaagtgatttgacttgttttgcaggtggttttatgatgaattcaagaagttatttcaacctgtaatcagttgattatgtcttgaacgtatatgttttgtgattcttacatggtgcaattttcgtggtgagtatttgacccattacctgtccaaattgtcggctgaaacttatttttacccaatgtatctactgaatatttctatccccttagagcacttgtgcgccttagtaaaatcgtgggaacattgggttgggggttatattcctgaatttgggttgaatttatttctgaagcttagacttgtaaacctgctagtttctactatttcaaaaataataataaaatttatagaatccaaacatgacaatgtgataatcacattcttcatctctatgataaagcaattaaattggaacaacaaacaagggaaaaataattggaaatttgggataacaaattaacaatcatgacaaacaaataggactttcaagtcatttcaagcaaaaattagcctactactgtcttaaaggttttgaacttaacattgaggatattttttaagagaagatacctgaattgaatagaagtgaattcaagcttggaaccgagcaagaacagatgaatatagaggaagcaacaaacatgagcccttttagcttcatggacattaagttgtgaatctacttttcatttatatatttccttcttttctcttatttgcatccacccctaattagtgataaagcctgaaacaatagttaactaggtaaattgaagaatgcataacattttggtgttatagataaacttggacgatgcagttttataatatctggttaccttttttgcctgaaatatgatgcatccacacttaaaccttaataattttgaagacatacatgaagggatgttaaaagcggtatttggtgggtcttgattctctccgtcccagttcctgtgctgatctttgatgtgcttctgtttggatgcaggtatttggtggggtttcgaacaggatatttattgtatgggtaattgagcatgcattaagattcatttgagacccattataaggcacattgcagcaacattgcctcctcgtacaagaatgttctatcatttcagcataaattgcttttgatgtaaaatatgtagctgaatctgtggactgcttagtttagctttcgctttggtagttctttttccgatagatattcattctgtataattcttttttgggcattaggctctttaggcccaataattacattattatctttgaattagatcagtgtagttcccttagtttgctgaattgtaagatacttcatttgtacaaaagccatttcttctaaaatgcataaccttggcaatttcgttatcaatttggcgacacgtgatgatttttctagctatcgccaaggtgtttctagattctgctggctgagctttagtattgggtcatgggttgtttacgggaggtgttttaataaaatatgttcaaatcgtccacttaataataaaatgatattgattgagtcacgtatattcacttctcttttcagacatgaaactactttcttaatgctgaattttgggtgaagaatttgaatcctgctaacttcgcgtccatcattagtcatgaaaaaactcttgcagtggtcgatctcgagattcatttcatttgcactttgtattgtgtgtaatgcaacagggagtttttgtacgacttgacggtacgactactaaatactaatagtattaaacattgttttatcagtcgcatcatcttcgtaaagtaatactcttaactttctcaataaaaaaattctaactcagctctagaattggtttttcgaatgaaagacatgtcttaaattgttcattttggataagattggacaaattacattaggtactatttttttcaaagaaacatactgactggctttgtttatcacatattgttatattagagatatttttatttcattatttgtcacactcttcaataattgtagatgtctatttttatacttaaataaattatactgggtgaatagtatgagttaaatattatactttaattttaacatgtatcagtattagttttattgtggttttatatatttcaaatatattattagtaaatattactcaattgttcattttcattaaataaaaataataacatttaagataaaattgaggcgttagttgaataaaaaaataaaattctaagtaaaatttttcatactctttaacaattatctaacctattttcgtaattgaataaatcacattggtgaatagttcagattagataatacggttgatatattgatcctgtaatgattggcatatttcaaacgtattttaaataaaaattgtccaataattcatcgataaacgtgcaaaataaagacactcaaactttttgtattcctcttgcatcatgcaggtaaaaaaactagttgtgtaaggcgacagggtgtttttgtacaacttgacagtacgactactaaatactaatagtattaaacattgttttatcagtcacttcatctttttacagtaatacttttaaactttcttgaataaaataaaaaatctagctcagctccagaattagtttttcgaatgaaaaacattggtgaaaattatgatgaaaaggtggggggatgcgaatatcaaacagggggtgttgggccatgttctttctgctgaggtttgattcacaaggcccaacaaagatctcttcatgggattcatttgctattacaaatagtacagtataaaatgtgtgtgtggggggggggggggggacgggtattacattttcataaaatattgtttatctcccgcttgatgttcacgaattttaatagggttccgcctatttaatctttatcaagagaaaaatatgacaaatttccatataaaatttttaactaatctttttttttatctaccactctaaaaaagcgttgttagtagtacagtattttcttttatcgatccctataagtagcatccctatctccatttattgatgcgtatttggtggcctaagtttgtgagtatagacaaatagttaacgccttaacggaaatagagacaaaggaattgaagtagcttcgtgatatcaagacgttgactaaagtcttacattggaaaagataaaccatttgcatgagcatcgtgtttgtgaccatttttttttgggtttaaaattaactacatagacataggagtatgattaatctagattgagtcaagtgggactatcatcgcagacgaaaaaaaaattcccctcgaatttaactcgagacgtactccttgattaagttagaaccgagatatatgtatgattagcagcaaagttgcaagtcctgagtttcatgtacatctccttctttcccaatatcattgaattcgagataccatgccgggtcctatatcatggaagaacttcaaattatacactgagttctgaatagcctatcaattttatataactgatatataggcatgtggatgcttacctcaattctggcaattcttcaaagtttagactcgatcgcttaattggagatgaaattctacgctgttagccaatcagcatggcttgatatagaaaaatcaatgcaataaatgtggatatgtagagatatactcctatgtacctaataaatgcccttttgtgaaaggaaaaaaaaaatcatattttacgctcttctttgtcgagacaaaccgctcttaaggtgtattttttgcctgaaaagtttgataccaataactgctatccttgaataattctgggggttgctcctttctagagtgacagatcaatatattttagattagtgttcctttagaatttgcgtgggcataaagctagatgcctataggctagatagagaatatataggaaagacaagttttatttataaattaaaattatatcctagttaaaatttaaaaatatttattatgaatgttataagagaatataaaaaaagttatgtataacacaattttatgtattttaataatttttttttaattttttaatcagtggacattgattaatatttgtcaaatgaaaatgagatataatatatatatatatatatatataacaatttttacaccaatttatacataattttatgtttttatctttctctaacatatattatatttcaaaattttctttttcttctcacttttctttttgtaagatttttttttacaaatgtataatttctcaatcaaaattccacaattttttaatatttttttacagataaaattgatgtgaaaaaagagagtcgtgggatgtaataaaaaagagaatactccacgtatacaaattataaccgctgcaagagattatcataactatgtgacatttaaaagaataaattattaaattaatatgccacgtatacatattttaaaggaccaatttaatgtatttatatgataaattctcagagctactagtacgcaagatcaaaagcacacaagctattctattggatttgaaaaattatttatagtaacctaagtcttaagacatataaagagaaagagagggaagtacaagtatgaatataataggttatatgatctgatataaaaggagagatgaagagaaaaaaaaggtattaataaagtgtttgatatatatatatatatatatattaattatattattactcattggatttggacctcaaaagttctccgagcatgtgcttttctacgtaacatgttttctccttttatctttcgtagtggtagtagacaaaaatgatgaaattcatagtggacaaaggaagctagaagaatttgttcataattttagatcaagttgtggttctagctagttaataggtaattaattaaccgtagtggttttgaactaaaataatatgcgcgtagctaaatttacacaaagacattaacgtaccacagaaactaatcttcacttgcaaaaccaaaatatattcctttaaaattatacaaccacactgttgggagaaaagatcttaagctagtaacaaagcacaaattaacatcaaaacacgagtaagcattctcattaaaacttttattctactttattataaggcctcatgcatccacctgtctcaaaagtccaaatctgatgttttgaaccagaagggccacacacaagaaaaactaggcaacgaaccgttgcacaagcatatatgcaaaagggaaataactactaacttacttttgaccatcccaccgtatctttgacatctctcttagggctaaaagtctcccattctctttggttgaatgacctagcttattaagttactaaaggtagcctacacaaacgtaattattttggtttcaccaaaaatatgagtagtgataattcctaatccactaatctaaatagatgttgaataaaaagaataatgaatgcgaaaaggataaattataaatatagttcttgtatttgacattatttgttttaatctctatatgaaaaaaaatctatattttgatattcatatgaaaaattatttatatacaaagtaatatctaatgtttattaaagttataactttgttagaaattcctacattttttatcttgaattgagacatgtcatacatgcaagcacacatatgtcaagtttttttttcatgtagaaactaaaacaaaataaatgatgtagagtagggactaaaatataaattttttcatataggatttttttttaatgtagagaataaaataaaaaatagtatcaaatatagggatcaaatctataccattataactttggcaaataatatataggtatcaattcatatgaattaatgtttttctatataaatatgaaaatgtataatttcttctataggaattaaattaaagtattacatgtaaaaaaactaaaacttcaatttatccaaatgaatatgaaccaattgattttaattaagttttagggtgtgtttgaattggcgtgagttatgtccaacactactgatcctttgtgagagagtatatatcagtgctccctgttgaacatgtatcaaaatgcgggattaaggtaaaacaaacccacaattaagagatataagtagatgctagattattataatgttcatacaatgacaattaaaatatgcaggagataatcaaatatgctaaatataatataaaatgtataaagtggtcggcattgtttcacgtaaatggcgactatcacggtggtttggatttggactttgaagaaggagctcaaaaagaaggagggggccattagctagccagatgacaaagattccaagtttttggattccagtgtaaattaaatttcagaggatagaattaagtgtcatattatatatgatgcctttttcacaaccttttggggcgtgttatgcaaggctctatttctatgtcttgtgtgtgctttttagtaggaattgaaaatatatatcagagaatttataattgagttatattctcgagatatatatatatagacgcacaaagaaaaatagattgagagaatcaaaatcacatcatttatttgcgccgttcagatttgaactgtggaagttaatcctctcttttcttgttcttaaatataatatagttttgtgtcaaaccctacgaaactgttaaaataagtatacattgtgggccaatatataactgatacagttagttaattacaatttttaggtatcatttaaaattcagattgcgtaattttacatgcacttctaggatcattcaacctagatatgaaattaagcctcagagcatactcctatatatatagtccaaaaattaatgaaattataaaaacaaagttcttacgtttccttgcattagatggaattgtacacggaggaaaaactttcaaaaaccagttgatggcaatgcctgtattttttcttttaatttttgtgacgaattataatatagtggtagtgaaaaatacagataaatttctcaaacctagctatatgacatctctgaagccccacccccactctcgatcggtctctttatatatttcgtaatctacgattttgactcctataatgaagaatccgaggatagatatgcatggccttttcaacagttttttttttttttttacttatttatttaattttcttatatatgtggtgaaattacgtttcttaattacaactttaattttaacttaatataaaaaaaagtgtaacttttaagaagattattataatttttattttactcacgacttaataagcttttttattttattttataaaaatggttttgataaagtcataattaaacactaaacacaacttatatgaaaacattgatgtgatctactcacaactttttaatgcaattttttttatgataaatggagaagccatggatcaaagacaaacgttacccctagctaattaattcatgatttgaccatgatttcattatcacaacttaattcgtggttaggcaccatgattttcatttaaattaatttgttgcctatcgcatgagtttcccttgaccgcttggtataaaaatgaaatcatgcatggtaatggagttgtggctaaaaacaccgttaacccttaaatttatataaagaaagtaatggttcgatgaatttattttaaaagaatcgtttactaaattgtaggtatataagtaatatattgcatattggtaaaataaatttaaattccaccaaattctctaaaaaagataaaaaaaaattatggcataggtgtgacaactaaacataattaaggggttccttttgaacgacattcaggattctgtatacctgttgagacatatatgtgtgctgtccaagctgagaaagaatattactgcatcatccttcttgttgacatatctatctcttcatattagctagctaggttctgttattgatcagttttatattaactttgacaattttttattttattttgtttcactaaatgtcttatagttttattcgattattttcatattttttgaagtttgagatggtatgtgtacatgcatgtacttatatagtaaatatttttttagctatatcaatatatcaacatcacttttaacttaagttaattgatattgatgatagataataaatttatttgtataatataaagttgataataaccttttaaatatttaaatgtaagactatgtatttggatattttttctaatcacatttttctcattcacaaaattcaaatttaaaattttactttagagaattcagttcaatgttacttaaactaatgacatattggtatgagactataatttaatttattgctttatatatgtatgagccaagtatttttttaactaatatttgaagtctaattttttcaaagataaaagttaaaatgaataatttgtgcaactgtcattcaattactaattattatatgtgataagtttattttttttaaaatcttaatagtcatactaataataatttatgtttggttgatctacaatgtagtgtaaaattcttgctgatattatataaaaattaaattctaaagattagcaaactaattttatctctctcaataaaatattttatacttactaaaaccaaagtgcaagtatttttttttaaattcacaaaaatattaaaagtggaagactggtcaataatatatatgtttaaggtattaaattatgtctgtgaatattatgttagacttattaacaatatgattaatcgatgtttctttatcgtgctattttttaggaaaaactaaataaagcagtaactaattaataaacaaaagaaagcgataaaaactcaattgattaatctttctaaaaccaggtcatgaagctgaagaatttgtcatttattttaacatatatggaaatccatttgcaatttgaacactttttaccctttcttttgaccgataaaactctagaacgattacttctctcaactgtttttgaacgtcttcattatacgagagaacacggtttcatattaagatgtaaatgaacttaattgaccatatgtaaaaaaagaattaacaatatatgacatgcaatgcatgctattgctgaattaatttgtagttgtgaagcaactgaatttttggggcatctgccttggagtaaatgtttatggtagcttgaagttgattataacttaattgattaccttttacatcccagaaaagaaataccattccatttaatgaattcgttttggtaggtactaactgatgaaccttgatttctggggtgatgacttaattaataatgaaataattaatcatcatttggcttttaatggattactttgactctccttatattataataaagccctaaacagccgacaaaagtaatcaatctcctcacaagaataaaatttataaaaaattgtaaaagttgcttagtaaagagtaatcaatttaagttgctatttacatggcaaactttgggcaaatgaaaggaaacttacgtagccttaggaaccattattatcaccttctttgtttttcaccatataggtagctagttaattgattccttaaaatacgtatcattactcaataatctaacattatattttaatctaaactgcttaattagctgtatcattatgcatcgagaaatgtttttttatatatatatagagtgaaaaaggccatgatggaaaactttgcatagcacttactgtcttatgatttagtacttttttttgcagataatataaccgatatggcattctgatatcaaatatatagggattaattaatgcaataagatatctgtatcatttatacacactataataaactttaattcagaatatagatcgtctgctcacagtaaacttcatagctcataaactttagtgtttgtgtgtgattaagatccttctacctatttaataaaataatccttctaccattaaaaatagctatagatgatcgaaacattaatcttttgtcgaatcttaggacatattctctataacagaattggtataattagttgttacaacaagcgaatacaatattatttctctaacaaaatatatactgtttttttggttttagtcagaaacaaaatcgatatttctatgtagcttatatgaatacaaagatccggcgccagtttgggccttccatgttgcacacgaggcccacactttagcttttaacttttttttcaagtttctttttagtatcattatttttcttttcccattgtgtagtatagttatctattttttttttttatataatgataacaacaacaaaaataataatgcccggttgcttaacataatacatagaagaaaaaaaagaaaaaagtagctagctagcccccccttctctgtctatatatatcacctctagcctcttgagttttccaaactctcaaacctccaaatactctttctcttgtctttatttttcatatacaacaatttccctttcattcattcattcatccatctcacagctattggggatcatatatatatatatatatatatatatggctccaatgggagacaatgttgttgtatccaatatggaactggagaagttgcttagcatgaaaggaggtaaaggagaagccagctatgccaacaattcccaagcacaggtaccatatatatatatatatatatatatatatatatatatatatatatatcatatgtttgttggttacaaaaactaattttttttatttatctgacaaacgctacgtcttaatttactaagaaaaactaaattcagtagataaaacatgcatatgtgatatttttccttaatgatcgaatccaccttatatattgcaggccatacatgcgaggtccatgcttcatcttctgagagagacactagacagagttgaggttgttgagggacgtgaggtggcatttgtggtggcggacttggggtgttcgtgtgggagcaacaccataaacgtggtggatgtgataataaagcacatgatgaaaaggtacgaggcattggggtggcagccaccagagttctcggctttcttctcagaccttcccagcaatgacttcaacacgctcttccacctccttcctccgctcgccaactacgccgttagcatggaggaatgcctcgctgccaacaaccaccgctcctacttcgccgccggagttcctggttccttctaccggaggctttttccggcaaggtccgttgatgtttttcactcagccttctctttgcactggctatctcaggtaaccaacacttaatttattagtacatactattttaggatttttttttttcaagaaataagttataatgtatttttcataaaataaaagtaaaaataatatctctcttcttattagaatatattacactgatcatgatatcccctcttatttcttccaaattcacaagatacttcttttgtctttaatttttccagggttacgtacctttattatttatttaaaatatattacactatcatttttgttatactaaagaaaacacattataccattgatatatatatcctgtaacttgtaagggggttatgtaaaatttaaaagacagggtagtatttcaaagaatggtgtaatttactcttatctctttttatacttttttttaattgttaatatcaactctgacttttggtttgtgattttgttttttcatgttttcaataaacagttgtcaaattgtcacttcatttaaattttctttcttatttttaaatatttttattttgtatagagaataacaaacataataaaattgtcttgtataaatacttaaaattaaaaataaagtgatattttatgtgattgtttctaaaaataaaaattctcaagttaaagaattaattattttacgcagttttttttttcttttttgtgtgtgatggggagggggagtaagttcaatagataacttcatttttacttctacaattttcattaattcgtttatttctctttgcaattgaagtggccggttaaattattacgaaaagtcataatttatttcaaatcatttatgtgtatctttcatcatttgtttgcccaagatctttataaacctttcgattagaagtccaactttaaggtaccacacatttcttggagacttttggtggatcacgattacactaatttcataaatcctttaaagcaattcttgttaacaagatattgccatagtcgtttaatttactccccaacctacccatcaataatcaaagattctctattcctgcagtttttgtcgtctaatctgttatttccacgacaaaatgaaaggaatatttgcctcttcccgaggataagatagtaaagccatcattaatttgaagcttaagtcataatttatggtcaaaaagtgaatgcagaaaacccaaggtctatagggttgaaaaaaggaccatgtttcagggaaacaagtaacgtgtttggacagtaattttcaatgcatgcattaagcacccaatgttcttctactttcatgcatcttaaatttcaataatatatggggccagcacaaagaatttgatcaccaaaagagacacaattggagttgggattccccctgtaaaagtgtgtactatttggtgcttattggtcacacacatttacataacatgttctttatcatacaaaattctgatttcttgcagtaaaagtgtgcagtgttttctaccctaaaggagaattgcattaaccaacatggtgtgacatagttaaaagataattttatctcttatacatatatatagttaggacttgatcacatgccaatgcatataaaaaaatatcttagaaagagattgactccttaaacatatatgaatagtttgggaaattagttatggacttcccgaccaagagatagtctgataccccaacttcataaaataaaataaaataaaaaaaaaaaaaaagcagaaatgcatggatttgaatttgctaaggtgaatgttagttaattggatgtgaccaattaatagtagcttattgttacattaataatgataactttatcattcataaagatcttactcgatttgagcataattagcatagtctttaaaaaaaaatatagtgcatatttttctcttcgttttgtttcaataatttactttggtgcaggtgccagaaagtgtagtggacaagaggtcaagtgcatataacaaaggaagggtgtttatccatggggctggtgagagcacagcaaatgcctacaagaaacaattccaaacagacttggcaggctttctgagggcaaggtcagtggagatgaagagagaggggtccatgttcttagtttgcttggccagaacttcagtggaccccacagaccaaggtggggctggccttctttttgggacccattttcaggatgcttgggatgatcttgtccaagaggtaattatcataatcacaaacatttttatgcatgcttgcttgtgtcaacagtggcacatagcctctatttcccattggctgaccaaaaagaagtttgagacactgtagagattaaaagacaaatatgctcaagtgttgtaggcatcaccccaacttatcatgagttttctctggccacgtttaaaataaattggtcccagccgttgattagccacccctatattgatctagccgtccatttcttgatcatcatgtcggcataaatgataattaatttccggctggctgtgtcttgtggtccataatgttgaccaacaattaggctttggatatcttaagagcttagaacaaacactgaatcacatcgatcatcatgtcttaaagctatagacaaaatggatatgcattcatctgatcaattttcatacaaagatcattgccaatgggacacaacaatgtctttgaacacagtcaaaggcatgtacttataagaaacatcctctaccatgttacacatccaaattccaaaactgtaatcaatgaagtacagaatataacgacaccaacatagtaggatgtgttgagtactttagaacattttcagttactcaaacatatgtcatggtaaatctcacttaccaacttaacactatagatataaggataatttcacattatagttgagtatatatacattattaatagaatggtagatctaaattgtcatatattactgatgttagaatttatttttttgttaccttttcaaaagcagaagtcttgatttaatttcaagaccaattcactatctatccttttatgaattgatatgaacatgttattttatagtaaatcatattcttgatttcagggattgattagccaagaaaaacgagacaattttaacattccagtctatgcagcaagcctgcaagacttcaaggaggtggttgaggctaatggttcatttgccatagacaagcttgaggtattcaaaggaggaagtccacttgtggtgaaccaaccagatgatgcaagtgaagtaggaagggctctagccaacagctgcaggactgtgtctggagtccttgttgatgcccacattggtgacaaactaagtgaggaactttttctaagagtggaacgtcgagccactagtcatgccaaagaactattagagcaactacaattctttcacatagttgcatccctttcttttgctcaaatgattagagactgagagaaaaagggtcacttgaagataactagacgacaaagactttttctccacaccctccccccccccccccccccctctctcccctactctttgtgtgttgtgttattgcataggaggagtcagaaagagaaaagagaggttgaaaacacttccaacctactgttttttctccctcttttgcgtgttgtttgtgtgtcatattgctgactctagttacttgctgcgcattatgcgctttctgacttgtgttcccttggatcgatctgaactaattttgctctctacatagcatacatattatagtgtccatatcttgtgagagtcgtatgaatggaacttgtaccttacaagctgggttgttagatagaccacttgatttagtcacagtttgctttcttccttgtcctcatcaatctaacacttttttttaatatttcattagcaaatctaattggtagataaatgattaattctgttctgttataatttaaaggttgaaagatggctttttctggcttgtcctataacatttttaatagtagttggatgctaccattatattgtgccatgccaaccatgcattgttaaatctgctgaccaagaaccaaacctgatatacatatttagttagtaggaacaaagggaaaacttccccaaagaaatgagtaatgcagagaagaaggaaaaggaatcctattaaaacaaacagaaaacagctgggaagggggaaaaaaaacagaataggatattatcagcggatgaaaagtgttctaagcaactgatattgaaaccagtggcggatctaccttcaaggttgggggggcagtgccccccccttaaattttcaggataaaaattaccaatatgccttatatacatgctaatggaagtgctcaaaaactgagacaaagaagacaagaaccagggagagtgcagagtgccatagttgatgatggaaacaaggaaatcatcctcgtaactgtagtgattattttctcttaatatgcccatttattgggttcggtttgaaaatgggccacaatgcagctgacataaaagttaaatggtatgataaaagttgagttcagtttgaattaataataagtttctaaaattataagtagtttattaataatttaagtacaaaattaaaagaaaaggagcttttgaaaaagctacaaggaggaacttattttcagcttaggtgaagcttttttacaaaataattctttgattctagcaaataacattcatctttctatttatttttcttttattgaaacctatggccatttatctttccatttcatcacaaaatctgcttagcttatttttcttttgctagccttttacatttgttatatttccttctgttttaatataagacactttcaacgtaatcacaaaaactaataaaagtaggtaattcaaatgtttttaatgattttattctgaaacgaggaaatcatcctcgtaaatggcattgtcactccatcatgactagagagtattttggaccagattgaggatttgcagatggtgtaattgttaaagaggtcagtgaaaaaacttttcgtatatgcaaggagttgatagatggtgttattcttgtaagtcgtgattcaatttatacgtcaataaaagtaagattttattttgcttgtaaagtttgtattctaaatctctgatgctatatatatttttcatgtttatatttataactttatatatatacttctctactctctagtatcttctgtgaatgttagaaaatttattgtttgttcctttggattatggtttataattatttgttcttttaattattgtttacaataaaaaaaaaattcaggagcgttatccccgaacccctgccactaagtatgtggatgtcactggtgcccccttgattatttttctggatccgccactgattgaaaccaccttaaaatgaaaccaacatggaagcaagaaattctcaaacaccaatatacatattatctgacagtttagaaccttacaaatagtcacgatcacattgtaggtggatcactaactcggattcttagctatgtctgagattttgatccattattcttgcactccaaatctctagcacatactttccaaaaacgataggagagacacatcattctagtaaactcacaattcacattaaacagattgaggatagaaactaattaatgcactaacactcattaaaatccatctttaatggatacaaaaatgatagtctccgacacttctggcagtctaaagctcacccttttcttcaccttactactttggcttctagtcaatggattaaaccccatttcttttacatcaaacttttcatctttcaaatttgaataatcatcaccatttgaaagttgctccaaagacaaactatattcctcccagtcagaaaaataggcactttctctagctattgagggataatcacagttagggccatgctttaaatcacaatgatcaccgttgcagttaccatgcttttccataattggtgattttagaagccactcctctaatgtgagctccttccccattttctgatgctgctcctctttattcttcttcttttgcatcaccttcttaataagaaagtaagtttgcttgatatttttgacaatccatactactgaactggcctttacaaaacatgagtcttccttaggtaatctttggcgcctaaaataagcctcagaacaacagaatgaaaagttaattcccattccgtttgtttaattgcaaatgggaagggtcataaggatagtggtatagactgctaagtctattatataggacacctaagacgtattatccaagagttaagaatattacactccatgcctttgttaatatcaagaagaaattaaggaacataattgatgaatggataaccttaatttattttttacagattaaataagcatgaataaaaccttttgcagtttatttcttcttcttatcacttttgataaataaaatatcacgaccacaactagtaattctgaatatctcagccacttatttataattatatgcatatatattagagagtactagtggccgttcaatgtttatatttgaagtaaagtgttaggtgcaattttacattagttagaaattgaaagattgaatatcacataagtaataggaaaattcataaatttgagggttttgagttgaaatatgatgtaagttcatttatgtggtgtgctcaaggtctattggtgtaaattttctgatgtttatcttatcgattgcacaacaattgctatgatgaaaatgaagacaaaattcttagcttatttgtcaggataagtcttaggcagtgacatttagtttggcggtgaagacaaggcttcccaatcaaacacataaagacattgttgacttgaagaaacacagttaacgttgcggctgagaactatttgccttggttgcatctaccaaactaccaaattgctcctgtaaaaggtaaccctaaaatcaagctagcagtaccattggagcaggaatttataaacaatattcatgaatgaatatccaagttgaagacagcatcctaaactaaactatgttggagtgaagacaaaattgcaagactgacaaacagtgaagcaaaagcctgagactccaattatatgatcgctttgtgttcaactgttcctctatcatcacaaccgcagataaagttgttcctatgccatatcccatgaatcgatcaagaaaggataaatttaaataaataatacaaattaaataaataatttgaaaaatgggacagttttgaaaatattttgaaatctgggcctgtgtaacacacccaaaatagacatgtttaaacacgtccaatttagacgtgtttcagctagttgtgacacgtgtcatacatgcacagtgtcgagcgaacttcgaacgatcataacttttgataggaatgtccgattgagacgtacgatatgtcaaaacgctcgaaattcagagaggaaggcttggacaactccccaaagggaaattggtcaactgttttttttaaaaaaggtctctaagtatctcaaaattacgatttatgattcaatcagtcaaaaattttcaaacaggttacttttttaattatttaattagttaatttaatgttattttctatttttttaattacttctcttaatttcgagcattttgacatatcgtacacctccatcggatatttctataaaaaattatgactgtttaaagtttatacgctcaaaattcacttgaactcaaaatttatgcatgtgttacaaaccaatttgaaatctattaccaattttgtttgcaaatcaaatcaacaatagtaccatgttaatgtatgaaagttttgtcccatattaagatgacgccatcttttttctttggtctcttatttatttcttttatcaataaatagaaattttattaaggagcatagggggtactttaatccaatatatatatatatatataaattatttgttagatttgttgttttcagttttggatctctttttaaaaatatttttagaaaaaatgttttctaaattttaagtaaataatttttactcttattttttattttctttgaaatgaaaataaaaaatacttaaatgaagctccaccttaatttgtagttgttatcggtattggtttgagattagagtagtgtgtatttgtttagtcaaagcaaaaataagagagacaaagaaaattaaatactaaaaagaaaacaaaagttaaaaattaaagggaagagattttgatcgtatttttcccttttacattctccatttttctcctatctatttaagaactagatttatatattaaggtttaggttagacagaggagataataggttccgcaagtaggactaccatagttttaggtttcttctacatattaccagaaaatgagaaatgaaagtttttttatacacattctttttttgccaaataacccaaataaggtaatgtgattttggtatatctatttaccaaaattatactgtaaattttaacgatttcagtttaaaaaaattaaaaaattacaatattgcggccgcaacactaatttcgaaaattgaaaaaattataatgtaaatttaaaaattgattttaaagtcgtatgctaatttcagtctctattttagtctataatacattttgtgacggaattcatggtcgcaaacatttagcgatggaaattgtggtcgcaaacatttaacgagcaaattaacgacggaagtgatttgggcgtgtttgacaattccggatttcaaattattttaaaaacggctattttttgaattatttattaaaaaagtattatttatttaaatttgccaaaagaaagtaccttttaactaaaattcatttattgaacgacatgcaacatattactttattgctaatgtagttcaaattaactatcatttggatggtttggacaggtaacagattcaacataaagggtgtagctctcaatttttccccctaataaacattgaatcagctatacagattttgataatacttaaaattaagataactcgtccttggagctttggatttgtctcttttaaagtaaacaactcaccttagaagataaagtaatatcggtcgttgataaaaaaaaataaaaaaatcaattgttaatattatgtttatggtgcacgcataacaaattaaatgcgttgaaatatcaactgcgaaatttcttattaacaactgaaattacttacttttcccctactcattttagaggagtcatgaaaattcagacttgcattttaccgtgttcaaaaattacttataattaaatttttcatggagatttgtttttaaaaaatatacatttttcgctaaacaataatcaaagcccaacatgtaccatacagaagaggtaaatgacgctatcatcctcagagtggaaaagacccaaaaagaaaaacaatgtgaggtgagattgtttttcatttctataccgttggaccactgctttttctcttgggcttttgtggcccttttccacttgtattgaagaccaatactaaatgttacgaatagatttcgtaacaaacacgcgaaaggtgttttctgcctaatttttctttatatttttttaattattttaaggaaaataccatttgtgcgaattcgtaccgcacggattatctatacaataactatctcctcctgaattgagtcaaaagcctagttttttttataaaaaaaaattcaatatctatccaattatatttaaacaagtagattcgtagtaaaaaaaaaaaaaatcgcactgtatagcatcgctgttattttaatcaacatttatttttaaaaacactgcaacatagatcttatgcttcgtgcgcctattttctcgtacaagcagcagcatagttgtccgataactggatggacttcccagaggcaaaaatcttttcattccagtatggcaaaaaaaaaaaaagaccctcatgtaatgcaaggcaactacgatttaaggaccataaaaagggttacttgtttctctgttaggtttgctgcagctttcttttgcaggtccagacacaacagtttctaagcaatgttccccaacagaaatgtcaagggtaaaaaagttatgtaatatggtagatttaagttaagatgtggaattattctatggatctgtttgtttaaatggttcaataagatgatcaagcgttgaaggctcactgtgactgatatcggagttcgaaggataagatggttttttggtttcttgtcaagtctctgtcaatgtcccagtgacgacacaatcacggtaggttaaaagttaaaacagatcagaataacatttcttggcatagccataagaagattcaactgttggatcttttcagatgataacccaaataccctaacttaatccacactcccgctccttgcttgaaaggaaacgggagtttaaggataatatggttaaacctaccaaacttattccaatttagttttcatctgacaatttccgtcaatacaatgtggcccggctatacagctgccagaactcatcactatcttctaaaaattatgccaaaccaaattgtactaatctctgaaatggaacttaagcaacaagttattatgatgtactaaggaatttcacaactgagattcaaatcctcagggtcaatgggtgaatgaacactaacctgaatttgagtgcaagaccaaaacaaaaaaagaaaaagagaattgtcccagacagaactgaaattcatcaagcagacatctcttatatgtattacaattccttgacaaacaagccaatctcaataactaccagataaacaagaaagattgcagtcccagcagattttatgatttccattcatcttccccaaatttcttcacacttaaaatgcatgatgtatgtaatatacaaaacaaggcatgcaaataataggtagaaaaaccattgaaatccacatttcgatttacataacatcttactggccagctgatggatttgtcaacaactcaagggatttcttcaagtagtctactgcaattgagacatcatcaaatgccagtgccccaacagcaaatcttgcagccttgtgtgcttctgctattttttcaggtgctggctggtagttactgtcatactggtatgtctgagtagttgacttaggttccacaacagttccatttctgctgctggaactgtgttgagcacttgatgaatggtttgcagttagcggagccgactgggaagaatatgaagcatctgacccttgataataagtataatttgatgggacagagggaaggctgctttctgtaaaacttggataagactgaaaatggggataagaaaaagaggaagtttcatgagaagggtaattaggatctaaatgctgtgaattctctggtgagtattgctgatggttgtagggctcaggataagaactttctgatctggcaggtggaggatggtaatcttgggaaggtggaggaggatgataatcttgggaaggtggaggaggatgatagtcttgggaaggtggaggaggatgatagtcttgggaaggtggaggagaatgataatcttgggaatgataatcttgggaaggtggggtgggatggtagtcttgggaaggataaactccaggtgtgtaagagtgagatgatggagaaacaatggaagaatgcttgttattatctactttgtcatgaaaaggcatagatggtggaatatttgcagaatgttggtcgttaccagtatcatgaaatttaggagcaggatgaatgcttggcagattctggtagttgacagggctatgataactacgtgatgaatcagattctggtccaggactggaaacagtagtttcggtagtcccaaggtcctgcaagaataaacagctcaatgttaattgtttatatttattaatgaatttatttatatgtttttttaactgatcaaacccagaagacaccaggtgaagttttgaatcatacatatctatcacttgaagaactcaaaggaactgagaggtcctcatcaccatcaggggggccagcagtgggcttccttccttctttcaaagcttttcttatttcagctgctttccacactgcatatttctgtttctgctccagctgtaaaagaaactcaaaaaagcattaaacatacagttacaggaagttgtattcttgctgcaaattgtttccaaataagaaaggctttgtggaaaacatgcaaatgcaatgagacatgcataaataaggaaggttcaattctatgcatgaaatacacacatcaggctgaaccgctccaaattgattaagaatctcaaaaaagatgctggcagcataaaatgttttcgctgtattcctgcaaagtgtcaaagaatatacgttaaaaacttatcacagatgaaaaattcttacaagcaagatagttatgcaaagggttttttaataatactatagcaaatgtttggcaaaagacagatgcttggtatgtaaagagagtgagctactatcttgttcaagacaaagaaacaagaagatacaaaaaacccttgtaaactttactgagagtctgagaccatagggatcacagctgatgcaacagaaccaacatacaagcttaaaggcttatttatttatttcaagctagcattaaaataaaaagagtgattttattatacaaatctgctcttccggcacgatcttgcttgtctgcttttccaaacacattagaagaaaatccctcgagatataaattgtcttcaggccccaactgaattgactttttatcctgtaaaaacaacatatttcagatacatcaattgagtaaataaaaattccataatcatacccaatcaaacatgtcaaccactaacatcttcaaaggaaagaaaactgcagattgccactgaaacatgccatagtatcattaattcattattattcacattcagacacttccatttaacatgagcagattcccttcttattttaaaaatcaacacaaagggatccacgagattaattaaaaaatcacttttatatttatttatttgcggatcacctttgagtttcagttaattgtgattacagtcagcataaaaaaacaacaaggtttactttagaaccttttcaagctgcttcatgagggaaaccagaagagcattagtggtcttcgtgcgctcactttgcggaatcttcagcccccgttccatagcatataatcgacctaattttaccaaaaaaaatatttcatcgtgataatttataacgacgattagagtatttcagatcagtgaaacaacaaaaattgccataatgaaaaataggtatcgatctaaaattaaaataaaagagagaattacagtaataagcgacgagtggttcgtgcttttgcaattcatcagcgcgttgaaggtatggtaacagcagcttcgcgggttcgttctcgttcgccatctcaattctcgcaaaaattcaaaacgcagaaggtattggaaaccacacgacgtcgtttgttggctttattccaaacttatgccttcgaccgtctttccctgccaaacaacaattaaggaaaaaaaaaaaaacttctcagctaagaaaaagtaattgctgtgataatttaaaactgaataaggaattataaataatatattatgttatatttaaaaataatcaattcatatgttcgtgctattttttattttaaattatcaatttagtcatttgcaagatcattgatgaaaaggatgacttttagaagcatacaatttaatttcatgaattcagttaagagggaatgctacacattttctttgatattctccatcaatgattctgattgcttagaatttattaaaaatcattaattttaataggttttgttactcattcaatataaattagaagaaaaaataattaaatgataaataaaacctattaaaaatggtaatttctaatacattctaacaaattatagagagaatcctataaaaaatgtgtgtgtgtgtgtgtgtgtgtgtgtgtgtgtgtgtgtgtgtgtgtgtgtgtgtgtgtgtgtgtgtgtgtgtgtgtgtgtgtgtgtgtgtgtgtgtgtgtgtgtgtgtgtgtgtgtgtgtgtgagagagagagagagagagagagagagagagagtgtagttagcattattcttcaagtaattagatattcatttacgatatgcttagctactagaatatgagaaaaatagatgaaaaattaaaattttctcttcttcaaatacaaatcaatgcaactcaataaataaatttagggggctagagaggacaagaacattttactattaaaggtttaattggactatttaggagttagtattaagaggaaatatttaaataatttatgcattaacaatataaaaaattatattattattttatcattgacatgtctgaaaaggtttttttactttttcaataataataaaaatgagaaacatatattttaatcaccgtatttagttaaactttattttagtctctatacttttaaattgatgaatttattccttcaactttaaaaaatgaaaatttaatccctcttcttgtttaaatttaacatttagtattaatttatatattttctaaagttgaagggctaatcaatttgaatgtacaaggaccaaaactaagtttaaccggtacaaagataataaaaaatcctaagaaaaataaacataccattcatacaaactaaactgttattaaatgttttagaggttttaaagtataagtaaaataagttcaaataccactaatatgttgatgattcccaatgggtagtacaaaaattactcttgattgataagtaattacccacttaacgagaatgatatttaggatttagatacaagcaatacgaacaaattttgacggataagaatgcagatataagtatcttagtatcaactctaccattttcaatgcattaagcaggtaagcaaaaataattattgttataaagattattttgtatcgtcaattgaactttgcacatcactcaaaactctaaataaccaaatctcaccactaaggacatggtttaactagtacaaaattgtctcatattaacaaccgatcttgagtttgaatcattagtatttatccatttaatactcaattaaagaatgttattcttcatagtaattctatcaatctcgagcaatctcgagccaaattgtcacatgtcacatatgaaagatacatggaatttctaaaagaaaaaaccctttatacccttttctttttgtaggtaattaattttatacaacttgaataataagtaacatttgattaataataccccatgcttgaaaaatactatgcgattaggaccattttattgcttgcaccgtcagtggaaataattaagaataataggttcaaatatataaaattaaataatacaatatataaaaatatgagagtagtgaattcaaatatataaaattaggggaacaaaatataaaaatattaaataattatatgtatttttttaaagtgaagagatggtatatacaccctccctatgttggagatccgagatctgccactgtgccctgtgacttaaatatttatgaaaacccaattgccatggacatgatgctgaaaactgaaacatctcacaaggagaaaatgtgtgttcggaaatttgcatttgacagcatgaagccggacagcgtgagcaactatttgttgcttctgcattttttccattctttgacgtgaaattgcagggtagacgtgcatatgtaacatcatttttttaagattatgtaacaccatttcaaacactgaaagtgaaacaaaccaatgaatagaagctagggtttggaaaaaggcaagactagcactgaagactgtatattttcatattatagggcatatctattgagaaaacctccaaatggcaaattgaacatacacagctcagaacagttcctctctaattacttgtcactcccatattataattcctaaagcactagtaatttgacaatgctacaaagatgaaattatagggttgaaaatgaagatctcattattagggtgatgccgggatgggttcagtaccagaaacatgggaagcagcatcttcttttgacatggccacataattcacgggagcagatagtctgttttccctttttccatcttttgatgtggacttgtttccattttgatgagcattaagcgatagccgtcggttaggagtaccattggctcctccgttagcacgaggacctcctgacttactggaactaactggcctagcagggctgggtcttgaaccaaagatggtttcttgttctgtgtttcgctgctcgtgatgctttttctgatcctacaaagtgcaaagtccatatgttatgacctctccgtaccacagtatgtataacaaatatagaatagtagtgaacaaaacagaaataggccaagctgatagttttaatttcctcgcagagttgtggtcttattactattagcaattgctcaaatcaagctgaaaatgagtaatcctaatcatcttattagtgaaaattaccctcatcctccgtttttcctcttcccgttcatgtctgagcatggcatattcatctaacatggcaagaagaggaacgccatcatatgtaaatgacatgccatgatcttcttcccatgcacgagttttagcaaccaatgtatcaaccaaagctgcattttcaccaacagaaacaaaattattccaataatgtggcatcatcttgttttgcttacactgacagcagattgaattaataataacagtatctgatggtgattgtaatctcattcaacaaatacctggaattttgttgaccaatatccgagctttctctgcacgtttgaggtttatgtgtgcacctctgcttgcattatacctgttctcatcctgttttacaaggttgtgtcagagtgtaacattataatccaaatgaggaggattaggcaaccatttaaagatcataacttgcagcaaagctaatgctaaaaatctaaatatttccggaaacagggaaaaaaacatttcaattatcttttcaaataacaaatcacttaaactgaaaactagcagactatataataaagacggatacagattaactctggctaaaggatttacaatttttgttaacatgatagtaaatgttcttatcataatactactacatcacctctctatccacggctgtgcacaaccaatcattcaaactcagaaagagaaataaagcagaagcgagattttaagtacccggttatagtcttcaagccaactctcttcttcacatgctgacatccatttctcaaccttgtccaatatatcttttcggcttaaagcttcttcttttgcttttgctatctgattgtccatgtcagccagtaattcagttggttcaatgtttcctgaatcaatcattgccataatcttctcccgggcagcatctggatctacttctatatgagcacgggcaaatatctcttcaagctctgcctgcttcttgaaagcaatttccttcatcctgctggctttcagctgatcaagtctctcaacttccacttcagcctttattattcaacaaaaaaaaaaaaaaaaaaagttaataacatacttggagctcgaatctgtaaacttcagaagttctgtagtacctgctcaatcagatccagagcaagggcaccaggaacagtgacttcatcaacagaagctgacatattacaggtaacatgatcaaatagtctcctttcctcgggatgagtatccattagattccaaagatcaatcaactgagaagctaattcttggagctgcatgaaatatccaggtcaaagtaaagaaaatggtattagattaaaagtcaagcaagtaatgaatgcaaaacattttgtcggtaatatcactctggggtgtcaaagtcagaattgatggtgatttcttgaaaacatacacatgattagcaagacaaaaaccacagtatatcaaaaatcctaaaatttgatagcttatacagttaacagctattgcataaatgaaaattaaggggaagaaatgttctaaatgcattaccttgtgcagcctctgttttttatcttctttcagtgttaagacagtcttagccagccttgctagggtgtcattacttatgctcttcgattgaacaccagtagagtcatttagacttggatgaacctcagttacagtactgaagaagtccataccaaggacagcacatagatcatgcacagtactcacaaattcaagaaccttgtgcaacctctcgctctgccaaacaaggcaatgcaacaaaactctcaatgagctgtttagtgaatgaaatcaaatggaattttccaaattagtgacaaactgaaatgacacattattgaatattataacaaaattaccttttccttttgaagttcttggagctcagattgatattcatctaacttcttcagggacaggtcagactcatcaactgcaggtgaaacatcattaaggttcaagtttccggctatctctccacatatttgttggatctgtgactgtacatccgagaactccttaattctttcttccttttgttgccataactgttcaagtaccggtgctatagctgcaagctgttctttgatagttccagaagtattctcaggctgtgaaagaataaaaaatatgcataggaaattagtttgccactttactaacaatataagacatagtcaggtagttactaacaattccagcaatgctcttttctccaagtgctgatagaagagtggaaagctcaagcttagcatcagacagagcttgaagtagctgcgcccttgacttggcagcctgctcaacctttctcttgtacacatccaagcactcctgctctaactgaagaagcatcttgtctcgttgctcgtcgctctcaccaacctcatcccatatttcctacagcgaataaagaaaatgtaattacttaatcccattattctgtagagcattcgcatcttaagtgacacagatgaactgttgaatgaagttagttacctgaagcttttttaacaaggaaccacatgtgttttctccaagaagaggattttgagcttcggtcactgccattgaagtcccagcgacacctagcctgcacctcaaaatataaaaatgacatgaaaattctttctgcttccaccaaacgcatagagaaacatttcttctcttccatgaagatcaagaaagtagaagacatctgctataagacaatgcaaatgcaattaaagcataattaaatgcaaagccgtaatccatcgtgggtaaatgttgaattccggtaacccaaaattacccatcccaacaactaaactaacgaattcaaataaggatctttgaagagataagccaaaaaaaaaaaaaaaaatcttaatattaataaaaataataattaattaattattgttaaaaagtaaaaagttttttaattgcatctgtaaagaagtcggattttgttcattacatatgacatgatcataatccaatgcagaggtaagctaattaagctaacgatcacaacagaatgaaatgagtcgacgaaacggaagctataataacccaatgatcagcaacaagtagcaagaaaatgcgatgatcgagaaaaaagagagggaaatgttcaccgtcaagctaaagaaaagaacgaagcttgaaaagaatagacgaaagaaagaaagaaacgcagcgtagaacaagaagttgagacggagctcacttgcattcacagagcaacgaggaagaagcagatcttgggggatgcggagatcagacgaagaagaagaagaagaagaagtcgctggagagaagaatgcgtaccgtttgaaggttagggttatgtggcttcagatctgaaacagagcgtgagcgagtgagttcgtgaaagagagagaaagagagagtgaggttgtgttgtgtagagtgtgcatataataatggggtcataagaataagattagatgatgagatttattagaacgaacttagatgatgcaaaagatagagtacagtgttagtgtaggaaaacaaaatggacccacaatgactatctatgatctatcttttcccttgtctagttccaagtcaattcgtttcttgccccaactcttcccccttatttacgatcatgacactgtgtctaaagtctccctcactcttcatttttttcaaatgttaccataaaaactttgactttgactctcggtctgtctaatgaattttatttaagatttaaatttactctcaattcaaaaagttgtgtattcatggaaaatttatagataattattagaatttaacttttatgtgttgtcggtataaagatttttatacagtctaccaattaaaaaaatatatatgtttttaaggatagttattataaaaattaataaatccttcatacaaacataactaaagcctagaaaaagaaactcgcataacaagaaagctgtcaatgggtgaggagaagaatctaaaacagtgaatatatctgatgatgatgatcccatatgaactaatcgatatatatacgcattgctcctcttctcgatagacatggttaaaacttaggacccaaagtctattcttgaaagattgaatagagtttatcaaagcagcatacgaatgccaaggaggttgatcatgattaataagatccaaagccacaagtgagtatgattcgcattcaacaattaaaagacaatgtttaaaaatttacactatcaatgtattttaattactattattgttatttataataattatcttactataatttattagggtcttattaatcagtatttttatgacattgtttaaaaaattaaaagaagagaatatttatttgtaaaaaccattgaaaaatataaaaaatcataaacaatacatttttgtgtattttaaatttagtaaaaatttagtttttaattttttaaccaatgcatcaagtaaataacctttctaaatttattactactatcttttaatatttttttcatattaataacataccaccttcttataactgccaaaatctaagtgtgtatttgcatatatcggctaaagtcaaaaagtgcggcctctcatattctgttttgtgagaagaaagtatttctattttctaaagttaggaaaaggtctgtttgggatattcccaacagaaaaacaaacacaggcttaaacaagagagaaatcgtttatttccatccacctaaacacattaccaaaagaatccattattcacttctaagtacagggtaagttgtttacggaaaagcaattaatgagcatgcacctcaaattgccattttatcacattacaaggcaactaagtattgcgccatgctcatgtcacagcaccagttatggggtaagcattgagctactattcaatttccgtgggtctaattaaaaaagaaagaaaataaaatgcaaaaataatatgaaatgcttgtaaaaattactatcaaaagccagcaaatagttagaaaaccatagaaaacataatggaattgataaaaaaatttgtaaacaattaaattagaaatcgtaaaagtgtaaatagttaattatgttcgagataaactcaatcgggagatgtttcaacttatattcctaatgtaatttccattacagatggccaaatattcttatctgccgatcttcttcccgtacagagtctgtcaaactccgctgtcttaaatgacattggcgcggtactctgatatgagtagatcagatcaatcgactgttccggctaatcacgtcacgaaatagtagttactcccagcccctttcctttacagaagaacaaaaaagtttattagttgcatccgaggttcaaagccctgctcatagaaggaccaatcttgtgaaggacgcagagggctaattccttctcgtcgctcaatctggagtaagaagccggctaccagcacgagtgtacacatcttgggattcaaaagggcttctgcttccctagtgaatgtcttggtagaagatatgatttctttgaattgagatttattcgtctttaagtaagcacgtaactcaacaagaaatttcctgtcgagagttcggattgctctacctaagtagaacgaaaagaaggaattggaaattcaacaacaaagggagagccagaagcttcgcttccggtagggggatattagattgattgtatccatatggggtaataataaaagggggaggagagcttaaaaaaacaagatagataacaaataaagtagaagtgcgggaggtcaaactggagattcatattgatcaatcgatctccgcgtcctgccagttcgctaagtagactcactctcccgaggggcaacaatggaactcttcctgccaaaaactaatcataaacatttttataaaaaaaaaaaataaagattgattaatattttatgaaagattatctccctcactagactcaatcttctatgatactctacctgcaataatgatttattattttgttttgaaaccatgtgcttattttttagggattttgaaaccatatgttggatgtgtgagaatgggtagtcaaagcataagaacgtggaattgcaggctagaatacgtccatggagtgcaataaaggccaatatcgttataaaatttaagggcaggggcaattgctagcaacaaatgggggaatgttaccctttttctaaaaaaaattgtgaataattatttaacctgaaaaaaagcagaggataggaaaactccatagatgggcaaaggcaaaggtcgcggtcagggatagggttgtcatcacgaatccaacacgtctctgtccaaatgagtaatgacagcatcaatgtgaagctacctatatttctgtttagtgtataatatataacccttctgcaacgtgacaacattttcatttcatcactttccttggaccataacttgcattctcattattctacgtaagccatccattatgagaataattataattttatcatcaattgatcatgcgcgggatagcctctatatccctacatataaatataattgctgcatttgggatggcctacgtttcaggccttttaatttattcagtaatatattatgtatctatcattgcatgaagtgcatatgatatgaccccaaaactactacccctggtgcaaaattcgaatttaccaattaattggatggtttaaaacatgaatcggtgtataattaactggtttgataataagcttatttaatgatattaataaattattggttaaaatgatattgagcttaattttattaagtaatatcttatgtttgaattttgtgaatgaaataatataattaaaagaaaaaatttcactcaaaatgatcaatcaatttttaaaaaaaataataattttatcagtgaatactccatcctcgtaacatgattaaaaaaattgatctgactctaattcatatatgtatgtgatcaaactaactaaattaaagttataaaaaaaactaattaaatgaaaagctaagaataaaaatcaggcaatgattcatttatgcatgcataatagtagagacgtcacacttcgtccatcattttttccacttgtatattttcttttattttcttccttttaatttaagacaaaatgaaagggcagagacagagtggctttcaaatctcatttaatttatagagtagaaaacaaattattgcttgtatatcaataataatactatcctttttcgatgtggcaatcatgaaattaaaaattggttacatgatcatcaagtacataactgaggtaagccgtaagctttttaatttgaccaactgtgtgaataagtagatgagagagtacagttttagttagaaaaaagtacgagtaataaattattagctcttttatcatccaacctcccactctcaccaatgtccgtcgaatcagttaagtaattaacttgaatatgaacttaaaagacacaaaagttgtgtcactctttaaggtctcacggggatcgctccatagtttaggatttatttgataaagtaatcctttcattcctcatttatgtttttagtttttttaaaagttttattttagttttataaagtatttttgttatattaaattaatatttccgacaatttaccacattaatattattaatcatggttgatgtgataattgtcgattcctttaaataaactaaaagaccaatttaatctaataaatacactttaacaagctaaagtaaaactttttaaataagatcaaactgaaacttaaaaaaaaaaaaaagaggagagtctaaaaaaaatattttatccttttgtttttctttattctggataatgatatttaaggatttttaaatttaagaattaattattgtgtagcttcaacattagaatagttgatattgcaattcttacacaagcattcgtatttttataaacaactcgttcttaacaggtcttaagaattgtgagacaaatgtataattaattttaaatttttaaaaattgtacaagtgaaattgttgaaattcttcaatctcatgtaatcttctaaaacccactaaggaggtgtttggtacatattggtatatatataaataatttttttagttgattatagatatttatgagtttttttaaagaaaaatataatatttttattataaattttaattattaatcacattaaataatttaataagaataatataatatttttatcacattattttttttataactagagtaagttagatttctaatttcccgtggaaacaactttatggaaaacttagcaaaatttattcacggacaacatttttttcttctagaaatgttacgcaaggttctaaaaactaaaaacttcttctttatcaagcgtctcctcctaaaaaataagatttagctcaactaacgtacagtctctaactttagagaaaccaaatcttacaaaataagttagagagtaaattacaacaatactcattgagcttttattaaattacatataatcttacccttttttattttcctacattaatctctttatatttaaaaatattttactaatatcatcttatatatgttggataatattattctgatactccctaacatttccttaaatcttaaaccaacactttctattagaaatatgaatgtaatagttaaaaatataaaaaatatttatataattacatgaaatattgtgaggtattattttaatttgttccaaattagacaactctatcgtaattacaatattttagatggtgttacaaacatatttccttacatgttttatacaaatctatcattatttatttttctctttttcacaaattctctttttttctctatacaatacccggtttaaattttctgaggtctacgataattttctggttaagaatcattatcattttattctgatatgttatgaattaagggtgtggtattttatttacctgccgccaaaagtttctatttagaccatgtattttactttatttattttagggtgtttatgacctaatagttctaaattctaatggcgctgtacaattagaaaagcaaaaaataaaaacttaagtgggaaaagtcgtcttccatttcccaaatagacgacttacactacctgggttatccttattagcacgaatgttaccaagtaccaacaatggtcttctaaatataataaagcaaaataaataaattattattcagctgttacccatggttataacatgttacccatggttataatttataaatagctaattaaattaatggttaaattcattctctttactgaagtcaaactccatcgcttaacttcattaatttcaaacaattataaaatatcatcactcaaagcaaaaccaaaattaaacccagtaatatataactttgttgtgaaacaactactgatctttactattctattaacggcaaagacattatattactcaataaaaataccagcaaattagttaaaagtaaatatgaaatccaaatttgtttggtatgaaaagtttccttcctttttgtaaactcgtaagatttgattatgaatattaatttttctaattttatatttactttatttaagtatgaattattttatgctttagtaattggtaaagttgtgctttatctagaataaaatatgaataaatatattttataactaagagaagagactaaatgtaaattttatataattcttttgtggaagtgaagtatatactagtaagaacaaagtaattccaaagagaattaaaagcttgaggggaccatgacacactaagttcgtctccctccctccacctaacaactctgtgttttttgtacttatctactactattctttagatagcacagtttcatgcttgttgctcaatacatggtgggtttagatttttttccaacacacgttatgtcctgtccgaaaatcaataatcaagatgccaacaatggaagacacatgtgggttggggccatgcaacatgtgacctacgcagggaattaatataataagatctggaacttgagaatttgcatagttgcatttgaccagcccaaagcacaatttctaacgcagtcacatgcatttgtattctcaattatttgctaatcatcgaccaaagtgaccatcttagctaaaattaaacagtgtggtttaattataatggcatcatctctcatgtgattgtattttattataggcacaaatctttgtaagccctgttcttgttctctctcgtatcatacctactttctttcttgtcgaattatatacctacttccttgatgattaaatatatcgtcatcgtggacccaattctttggtttgccacaattgttgttacgccaactgaatggaattaatgttcgttctaattatagtttaatagaacttttgattagttagggcttttttattttattacttattttttaattttaggttttgatcctctaatttttagaaatgattcaattagatctttttttaaaaaaattatttaggtcctttattatttaaaataaattcaatttgatcctaattttcttttgtctactccaatatttttttttaaaaaaataagatcaaatttgattttaaataggatcaaattgaatccatttaaaaaaaataagagacttaacttctaaaaacaaaacgacctaattgaaatatttttaaaaattagagaacctaattaaaaaatttaatactaagaggatcaaattaaattttaaaaataaattagaggaccaaaataacaattaatccttaattttacgttgctgacaattaattgtagtatctctgcattttagaaagaataagttatttccaaccatttaaaaaaaaaaacaaaactgtaataattaggaaaatcgtgtctatagacacacgttacaaacacagaaaaattgataaattagacaaaaacaaaatacaattttttgtctacaaattttaaaaaataatgtcatagacgtgtaaacaaacacactaaagaaagagagagagagaaaaaaaaaagaaaaaagtgtcataaacgggttggcaaagtgggtcagcccaccaaaaataggccgggctggcccatcccactaaaaatgtgggccgggttgggctggcccacttttataaagtgggctgaaaatgtcaacccaccccactttaaggtgggttagtggaccagcgggccagcccactaacccaccttaaaaatatttaataaaaaaataaaaaatatttttttaaaaaaaaatatttaagttatacgaaaaattaatattaaattcatgcctgcaatcattttaataccttatctcacatgagatgatgagaacttgagaaaccaaaaacaacagaatcaaacaagtcttgcaacattcattgaacttccaagaacaattaaacaaaattagaatgtgaaatatttttttaaaaaaatattgtttaataatattttaaaaaaatatttaagttatactaaaaattaatgttaaattcatgtctgtaatcattttaatattttacctcacatgagatgatgagaatttaagaaaccaaaaacaacataatcaaacaagtcctgcaacattcattgaacttctaagaacaattaaacaaaattagaatgtgaaatatatatgtaaaaaccaacctaaaatccatggaaaattatatgttattagagtctaacactagattaataaatgaaattaaagtttacaaagcaacatccataattccatacattaaatttaaaatgtaaaaataatatttttttttggtgggccgtggcccgatgggctggcccgtcccacattttggcctgcgttttagtgggccgggttggcccggcccattttcctaatgtgaacttgaagtgtcaacccaacccacatttttttgtggattaaacgggccggcctgccggaccaggcccattttgccaaggctacagtcatagtcgcaagaccaattatactgaaaaaatatcacagttaattttttggtgaaatctaggtaaccattcagatttcagacgagaattctctatatggaattgggtatgtaattgggttactcatgccttgactccttttggatgttgatggcgttgtattgtcgctctaaactgtctggttacttcttgtaccctgttctaatattaattgaaaagttaatctttgcctaaaaaaagttttgatatattaaaaatcattactatattaattacacgtacaaaaacatgaccaagccaataaatattattttgtatcatatttcattatctaagaattattaagaacataatcgtaaattgtgggaagaaccaaattaaacaaaattttaaagataaaaatcaaattaaatttaaataataaattctttaacttttataaaattaccttaaaaaatatgtaaattgtatgatatattataatgttaaattttatttcctataattagggatggcaatcaataaataggctttgagtatgatactataatatacaccctaaacttgtcttttagaaaaattcttatatttatattcatactcgatcgcgtgaataataactttaatatcatgccgtttttttggatatctaaatgttcataatcatagccattatccacattttaaaaatagtttattttaaaccacaattataaatatttattataaattgtaatcatataaaaatatttaggctaaaatataatttccatcatccacttttaaaaaatttattattttagttctcttattttttaatttagacatttcattcccttttaaaaaaaattgtgatttatcctcccatggctaatttcaaacattgaaattacatataaaaaggataaaaggtaatttacaattgttataaattacgtgtgaaaatgagaatttttagatatgaatgaaaattatattacatatttctaagaatagtatttttatatatatatattttaagtttagatttatttattattattttaaaatatattaacgttaatgatgattaaattatatattatgaaaatatatattatagattgtattttttgttagtgtagtttgatttaatattaaaattcatattatttaatttttgccttatctcaattgatttatataataataacatgaattatgttaaaaaattatttcaatcaaatcaattaaagttacacgtaggttctcatagttattagaaaaattattttttaaaataatataatttatagaaattacgaagataccatgtgtaaatttccttttcaaaaacattttccgctgtatatagtatagattaaaaatgatagtaataataatatatatttatactataataatatatattatagtacaattttattaaaatttgaaatgtaaattcattaaattaaattatattagttatattatttttttaatatatattaaatcaaatcagattaattattgattcacttattcaaactcaatgtcgtaagacttattttaacgacattgctcattggcatcgagaaggagggtattattgtacaggacaactatagaattgactagtttttttgttttaagttccatgaaggtaattaattattgttcatctgttaaacatgtcgtgttacttttatcttttatagtacattttatgatattagtaatagatttatatcataaagtttttatatttattagcgttttcagtaaccttatgggtctggacccgtcacttagtataataaagtaacccacgattattactggtcaatgcggaccattacgtatctctcgtagttaatttgttctctcctactatgtcttgtgctgttaattctcgtttccccgaaacatagcaaagccacatctaacatcataaaaaaatttctcaattcgtattgatccttttgtcattttttacctcttaaatccaagtatgtactcttaaatttcaatctgcttctccattctccattgttatttcttttttcttgatatatagtttccattatttcgttgttagaatcattatcccatttctgttttgagcacatgaaacttgtgccttacaagaaaaaagggtttcgattttgtgagtgtgtgacaatcaatgatctatttttatgtaactttaataactatatgttgggcacatgcttattgtttcaaaaaaccttgaatcaaccatcgaggctcaaactaataggtcacattgttaaattttttgttgacggacgcatgcatgcatacttacatcatcaatatcattttgtacctagtgtccactaatttcgttgcttattatactatattgttgtgtatttaactttcccaattatgaaagtgattatgtatatttagtatgagtgctgaattttgaggatacagccattttgatacattaatatgaatcctattagggatgtgtcgtttgcttttataactttgccttctaatgtctcagggcaggtctcagtccgtgcatgtatatcactccaaaaatatttgaactatcacttcaacaatgagagatatacatacggatactaactgtagttcaccaagaacgccaaatgttcgacaaagaagacgctcaaatgaggttgatattaactgtagttcaccaagaacgccaaatgttcgacaaagaagacgctcaaatgaggttggtgtagtaaaataacatgtatgcttgtttgtgatcggggatacatttatttcaaatatcaagtttttttgtgaatttatgctgctgcaagaccagttatctatagattctgtcaattcagaaaccatttgattatgacaatatgcacaaaattattattcactcctctacacattatttcttatctatattatatccgagctatacaagacatgtatgaagagataactacgagtgtgagaactccaagagttgaaacgaagaactttcctattggggtaggattatatcacggctcagctttaagttcttgtttaacatagttttggatgtgcttatcaaggacatacaaaaaattatccctaattgcatgctttttgtggatgatataatcttgattgaagaatcaaggaaaacagttaacaataagcttgaggtagactttggaaacaaaggattttcacttagtaggaggaagacaaagcaaatgcactacagttttagcaagagacacgaggattttggctcagaagtaaaattgggagaggatgtcataccataggtttctaattttaaatatttgggatctatcatacaaaatggtggtgaaattaatgaggatgttacattagcaagatggcttaaatggagaaaagttttagaggttgtttgtgatcgcaaagtacctaccaaactcaaaggcaagttttgtcgtatagttagatgtccagccatactatatgatagtgaatgttgggtattaaagggacatgagagaaaaatgaaagtagcaaaaatgagaatgttaagatggatgtgtggtcacataagaaaaaatagaatacggaatgacgttatacaagagaagattgatttagtatccattggggaaaaatgatagaaaatcagttaaggtggtttggcatgtacaaagaaggtcacaagaggtgttagttagaataactaatttttcatgatatttagtccgagaaaaagaagagggagattgaaaagaaagttggaggaaatcatcaagaaagatcttaaacttaataatatttataaaattttgatttttaaccgtgtcgaattacatcatgtaatccatgtaaccgacctcacttagtgggataagactttattgttgtggtatcctaatctaatccagctttatatgtttccaaagcttattattattgatccatttggttggcatttcaaatgctattttttttttcttataagatacattacatgcagttgatgaagtcattattgaatatgaacttcccattaacttatgtatacattatttatcattaatcaaatactgtagaaaatgggccggggaaatagaagaagaaaaaatcattttaaagaatttgaaactgatggtttttgtgtcagattcctgcagagataagcaaatcaaatggaaacaatttgcttgtcaatgatgaatccaaatacaaatcaatgtggatccgtgcatactcatctctgtggatgctagcgagtgtctcactaatcatatacttgggtcatctttacatctgggccatggttgtggttatccaaatatttatggccagtgagctcttcaatctacttagaagagcaactcaagataaacgtctccctaagtttaagctcttgaactggtaagcattcatgtacggtaatttctaaatgattatttgcatatgagaaatgtttagtttaatatatagtgtttcacaaagatatgattctgaatgcaatgtccaggcattatttcttcacagcaatgctattcgtatatggccgtattctcagtcaacaacttgtgaatacagtgacttcagataaattcttgtatagatttgtgagcaacctgatcaagtatcagatggttatatgctactttttatatattgcaggttagtacttccaaatgttttattcataattgtcaccaaatttggtaagagagaaaacatgaataattataataaagatacctttaggtcctgtctttgttgggcatattcgtcataaatctgaatcaatcctgttacgtaacttaattttatctaatatcctgttaacctagtcttctgcaggttcaagtgtttgctgcctgtaatttcaaaaaaataatctttcattcttgaataagtcatttcatctgtgatttcaggttttgtatggtttattctttcattgaagaagagatattacaagtatcagtttggccagtatgcatggacacatatgatacttattgttgtgtttacccagtctgcgttcactgtagccaacatatttgcagggatattctggtaacatgacttctgttatattacttgatgatgaaatctccatcatctaattccttcttttggtttattttttcctattatatgtgattttagcttacttaaacatctttctaaatatgattctacgcaatctagcttcatttacatttgatcagaaaattgtagaacatagttacttacagaaaaggatacattaaatcaataaacaagaaatagtctcttaacaaattctttttaataatttgcatctttttttttttttttttttttttctgttagctttctgcctttctctaattcttgttttcattccaacttactgtatggttgtggaaaaattatatttttgcatacatttaatgtattgaaaaaaatatgttcaattttttatatgttgactttgatattgttatggacatgagtaaaaggataatcagatataataagtggaattttagtggtctttgaattaactatgttgttgctcaaaaatattaaaaatgtttctattaaatttgtggtttgattgacttgtacaaagatttctcattattaaagaagaggaagaaaagaacacaaataacgggactctttataaacatggcatcatgattcatgaaatttacaatatgtctattgtttttgctcccaaagaggttcactttcctgcaaaactaccatctgtgtgtatcctcactcaatggaaattctgggttctaatacgagtaactgctttggtattgccaaccactatgtttttcatgctttaattgattttattttttctagttacaacctaacatattaatataatcatgcaaggtttcttttccctgcaatcctcattgctatgaatgatgttggtgcatattttttcggtttctattttgggagaacacctctgatcaagctttctccaaagaaaacatgggaaggtttcattggagcgtctgttgccactatgattgctgcatttacggtaaacatcagttagtgacatgactgacatcaactaccatcccaaaaagctttcaaaatttacaccttgtgtttaactcacaacctccactttcagttgatttaatgatatttttcagtatttttgctttgcatgattatgtcacttatgtttgtgcagtttgcaaacttcttgggtcgcttccagtggctaacatgtccaaggaaggtaacaatcttgattgggtgcagtcatctatgaggaaatatttatgctgttcctaatgatggtgaaataaattcaggatttatcaactggttggcttcagtgtgaccctgacccaatttttaagccagattacattccattgccaggactgatttctcattgggtaagtaccaaaaaattaaatctatcctaataattacaaagagatagcatttttgccactaagcttaagattaagaatttaagactaaagtttttcattttgcaacattttgtagcttccatggaaagagatagcagttttgccagtacagtggcatgccttgtggatgggactatttgcgtcaatcatagcaccatttggaggtttttttgctagtggcttcaaaagagcttttaaaatcaaagtatgttcttgctctttatactagacatttattttgcatccatcacctttttccattcactttgaaactcccaaacatagcaatagcattgatctctttgaatgattacaggactttggtgatagtatacctggacatggtggatttacagacagaatggactgccaggtttgctcatagatagatatttatgtactagaattatccttggtttatatctgaataggctattaattcagaatacacttttcaaattttttatggcattatagttagtcaataatcagtaactgctatgattgatcttgctttaagtatttgggggtattttctctgttttatatctaccgttttgttatcgatgagctaagatatcccattgtcttgacatgttaaagtgaaattgattcattactaataaaatttatatgccctcgctatatacaccttgtttcaatgctcagcgctttcaatttcaccataaatcatgagcggctttctatgccatgctataaagtacacaaataactctgcagctattgtgagagtctgtgactgttgtgttttatactgtgatgcatcctctgcagatggtaatggctgttttcgtctacatttaccatcaatcatttgttgtaggccaagactattcagttgagatgttattggatcaggtgagtctctagtttaagcaatttattggctaactttcattcatgtgaaaattagaggattctgttttctttcatttccaatattacacacataaatcaaactggatacatttcattatggtcattacccataggtgtaacgctcaagtgttttatttatgtagataatgaggaaccttggttcagaggagcagctatctctctacacaaaactcgggaagatattgcaagaaaggcatttatgataagttcactatacaattaatagagaatgcttcagttggtgttttatttgtagaagaagaccctgttggaacaagtggtggagattagtaaacaatctttttagacctctttttagctgctgaactatgttaagtagagtgtaccgatccttgcaagtgacattccttcttttcctttagggcttaacattgacactttaaagcagaattgtattgagaaatatattggtgtttttcaatactgctttttattagtgttatctactattgatttatcatcaaagtctcaatataaaaacttgtaatgcattattctattcttaatattctttcttcaaaattcaatcaagaaattttctcacaatttacatccgctgaaacaacacacattcaaatgaacatgcaatttcattttcctgatttgttttggctagtgctcatccctcacttagttatgtactgaacctttgcatgttctctcaaccattcaagcactttagctccttctagtatttcttgaaccttcacgaaagtaaaaaaaagatcagatcaattaatccgcaaaattaggaaagagagtttggcccaaaccacaaattaggaaagagagtttgttgactgttgtatatgcatataggaaacaatgaagcagccaaaacaataaacaacagtcaacaaactcagaagtatggcacaaacctgtcccttcacccgttcctcatcatattcttgattttgacgtttgaattcagcaatggaattctcaacctctttgacaaggtcctcagtagcaaactacaaaacatacaagcacaaatcattccaataagaaaaaacactcaccaattaggcagtttaattataatttataaagcaagtgatatgtgcaaaccaaaatattatttctcaatcacagaattgtggtggccctaatacccttgtaatctttttacaagtgggaaagattttgttgtcagcgtgacctgagcaaatatttagaatggaaacgtatcttaatcaaacatgctacctgcagattttcacgcctatatatatcaccaactgccagactctgttttatcaaatttgttatattttccttctgatgctcaagaaattcgttcacagccttcgagcttgacagagtcgccagctgctgctcatttagtttcatttttgcctgagagaggagttattattaatttttctttttttgcattaaatcacgaataaatgtaaaaatttggaatctaagtcgcctgattagcctgaaaatgatgcaacttgcaaccaatacctgtatttctaataggttggctccgtaaagctgccttccttgttcctcaaacaaggattgaggtatatcaatttctaccatctgaaaatgacaagatgcacagatattttgtgataaaatttacatactccaatgttttcttgcagcataaaattcattaaaagaattatgtgcaggaaagggccaaagagagggaatccaaatttaaaggtaacttgtttcataaatgtcagaatcagattttttctaaggatatacttaccaccatacttgatatgacatagatgatttacaagatacgttatgattcaaaatcaaccatgaggttcataaggaaaggtaggtcttgtcatcttattacagaaaattgaagtccttgataatcattatatgcctaccagaaaagcataataacaactctagtgtatccatgtcagatgcacataattatgcacaatgtataagcatgcatattgaaaacatgtggcaaggtatgttctaatctagaagacgagacaaaatcaatccaatacatctacttaatgtaatgttaccttagaaatctgatctaagatagcattatcagttgcttgttctctagctgtttgctccacctcttgacatttctgtaacaacaagtctttgacctggaaattcatgctagagaattttactctaaattcaactaaaaaataattccttaatttacttgacaatcgtacttaagggtaaaaaagtcacctgctccactgtggtgcatccagggagaagcttatcagcaatagaatcatccagctctggtaaatctctgtaaaaaagttctttgcattcaacctgttatacataaaaggtatttacaataatcaagatcagttatatatgcagccaaaggtgtgtttaagcaagctaaaaggaaatgatgagatccaaacatgcacctaatgttgtattcatgaaaatgagttgagcactgtgtacactatttagaaaatccagagtttgaatcctattcctattgagagaaaatatagtttaattttggcagagggataaactatcccctccaatggaaagcaagaaggcaatttagacaacattgcctgaaagttcaaaaactttccttctgagatgcctgttctcaagtttgaggtaaagggtgctaggctagagaggagtagtttcacgccaaaaacttttcacaacttctctatctaatgaatcactgattttggagtcttttgcctaggggcagctattctgcctacagacttctaaaaatatacaggataggtaaaaacttcacttcctttcctcaaccaacctatagtcgctgagatatgcacaatctggtttatgaactgaaagggattactagcttgactagcaaactggatgaaactctcaagatcatctagattattagaaaagtagatattcaaacaaagatttataactttcttattatttttatattaccaagcaaaagcatcatcacaagaaatagaatttttcataataaaatacagcagctactcgaatcattgcacaatcattttatatttatctgtagggatttgatttttgattttaggatcatgtatggaaaacactagaagacttctagctagatcacggttactgtatgatggggctacgactacacaagctgaacaagaaaggtaaagcttcatttcttgctttcatcctctttcttggaggtaaatgcaaagataaaagctggtattaaaatctgatggagcaacaaagctaggaccataaacatactaatgtaagaaaagaaagtgttaccccctcttttataaatcgaagacaataactctatcataaggagatgaaaaagcaccataaattgcatgagacatatggccaaaaagtatttattttgaagaatttggtatccaaaggaccaaaagaaaaaaactatcatgtcagatcatgtccctaaaacaattaaacttctttgattcagcattagaaacttacagtaaactgagcatgaacaccttgaagattttcttgcttccatgtttcaggaaatacaagaggaaaagactttgattcaccttgttgaattccaattatagaatcaaggaaacctggtaatactttttcaccatcttctgtatcaaaattaaagcctgcatatccaatatagatttagaggaaatatgttcatgatgtactacaaaaagaaaaagacttgtatcgcttatcagtttattatcatccttcaagcacatcacccaacctttactttcagcagaaggaatacttttaacatttgattcatcttgatcaatggttgttgctgagatgtcgaggacaacaacatctccaacctgtgaacagcaaaaaaattgtagcagctggctaattttgggtagactagtcgaaattattaatacagatattaattatcaagataacaaaagtgtctgtatgacagttatttattagtatgagatagtaaagataacataaaaataatcagtaaatatccttcattgtatcagtcacaactaaatataaaacatacatgatgaaatctatatagtctgtgcttgctttaaagaacttggaagttttatgactaaaatgattcatgagagtttcaaatgaatagcatttctagtaaataatcattaaaaaaataaaaataaaaaagcaaatggttgtatgccagcagactggtataaattaaatttagtcacctgtagccctctgtcagtaaccactttcagtgcaccaatggacttataacgtcttctaaattcttgttcagatgctctgtgagcatctatatcactatctatctcaacaacaatctttaaatttttgtatgcattattatcgggaatccatttgatttctggtgcaatatcaacaaggacatcatatctggagattggagaagttaaataagtgagaatagttaatataatctgcctgtagaagtcgttggctttggctgacattctgacaatattagcattcttaatgatagtcttccttttctctatattatgtcagaatatagttttagtattacagatgcagcaaaggaagagaaaaataacgactctaatggaaaatatatttcaaaaagcttaacctatagattacctaagagacccaagagaagaatatgtctcctccatctcagaaaacttagtcactattcgtactgagtcctgcaaagcccttccagtaacctataaacaaagttaattaagaaatgctcaagtgtaagatcagaataatacttgatctaataatccactttattcagtaataaccttggagaaatgatcaggaaattataacgattttttttaatctgttgatcagtatcaagtcctcagatcaaaggcatttcagtggcacagattttaaataaatgcattattagatagcactgttaaatagacttaggtaacgaggaaaggtcatgaaccaataagcttgtctttcaataatgaagtaaaatttcaagatcagggaattattaacagatataattgcaagtaaacacaatgaatccaaaagtgtaaaaagaactaacatcaagagaaaaaaataaggacataaaaaataagaaaatagaaactatattgtaacataccgatgccatagcatgtgagagtgtcctcctcaatatagattcaatagtagccttctgaacattttgactcccaacataactaataagaatgctttctggaactttctttccagggcgaaatccagggatctgttgacttaaaacaatcgtaaattagctcataaagataacatgcagccctttggatgctgaaacctgggatccatgacaatctcaagtaaattcatatatgataggatagagcacatcccttaagattgtgaggtttagtaatccgaaattttcaatgagaggttttagttatagtttcaaatttagaaactgggaatcctcttgagtcttgacagacaaaataaagtgcaccgtattcacagacaacaataatttgatgcatatattttctttgagccagaatataagaaagacattacattatataattatataaagcataagtgtaaccccatagcacctttgcttgcttcataaactctgctatgaccctcttgtaacaatcctcacataccaatgatggcacgtccacatgcaatctaacctgcaaagggaaagagatgcaaaagtacatattcagtgatatgaattctggtccagaatatgtgctcacttgcttaccattatcttatttttaaggctttcttttgcaattgattaataatgcttgcatggaatttgaatcttctcctattgtttaagtaacaagatatggtcatgttgaagagaaaaatacaccttgcatatattttcacaattatcattaccctttataaattatatagcaaactacatatgattcacatatgattgttgagctgaaccaaactgagaaataaagataaaggaaaaaaaaaaaaaaagaacatactctggaattgggttccgctgtttcagtgaccttcaattctgctggaagacggtcctgttctgtgccaactgaaactgaagaagaagaagaagcagcagctgagagtgtgaagggagaagaagtgtgaggagagaggaagggttggaagaggtgaatatgaggcgaaaaagatgagagtttaagggaattgaatttgaagggtgttttagtgttggcattagcacgaagaagaagagagtttgaagaggaagaagggttgaaaagaaggaaatttctgaaggtttgagtgcacacctccattgtctctcagcactcacagcagacagacacaacacagagcatgttgatcggataaaagatagatattgtctttttaagtgtttattttaaaatcaaaatgtaacaatttcagtaattttctggtggtcccaagtttcagagtttacactttacagttatagaatgtgtcaactgtcggataaccatgcgaggaagtttttttagaagacaaaaagtaataagcacattaaaaattgtgtacattttctaatgaataatataataaaagatacaatatagttgaggttacgataacatatgatattaattttgttttttaaaaagttttatgttaatttgatcttgataaaaataaaaaaaaatatttttattggtaaatttcattagacactaataatatgtgattgacatatttatatttatacgtgtaacagatttttagcaagagcgttaactaaatatttgactttgataataagaaaggaatacattactctcttccattccaaaataattagtcttatattttaagtagatcaataaaaaataataaataattaaaagagaataataatttataaaattaaccttatattattattaattcatttataatttttattgtccattattaatattataaaggatataaataaaaataataataattaatattacattaaaaaattaaaataaaatttattttgaaacaaatttttattccaaattggtgttctacctcctacatttctcctaaattgagcataaagaccttttaacacgggctatcaaaactaatggttaatttcttctactcgtacggaacaatcaaacaaaagaagcatgcatctttttctttctttcttttttctttttttccactctttctatttttatgcattcaacaaaaaaaaaaaaaaaactctttctatttttattcttaccaaacatagaataaaaagtaatgagaatacgtacaaaagtaatcttatattattgtattatactatttgtttatctttcaaatatttaaactaggaacgttttctcctccgctaagatgaattagttaagtggcaagacattaattttgaatacattaaattaattgtccaagcagactgttcaatttttttttcgcctagctcttttatctcccttataaagtctaatgtactttttgaacaaaacaagattaagaaatattgtgttctttaaatttttaggatattttatgcctttatattgagttttttttctttaaaaaattcactttgagtttagatttatccgaacatggaattgatttaattaactattgttggatatatagatgagaaaatgttttctttttaaatactctacaacacgaagagttccttaaaacaagtatttcgattagattaatattttaaaatcctcctttaaaagtaacattgtctaagtaattgtccgaattattaaataaaatgttttttttataagcgaaaattattattagaagaaaggcaccagtgtacagaatatgagctacacgagtatcattacaacaaaatcctataccccgagaaggattccaccagcacagaagaagtactagtaattaaagatagagtgattataaatcattaaataaagtggtgttaagtgcttatataattaattatgtttatttttcatttaatagttttttaaaatattagaagaattatgatgaaaagatcatagaaaaagatatatcactgttgtctcaattaacattgaactcagtatctaacataaaccagtgaaatattattataaaccactagaaagaaaaatagtgaaacgcaatgacgcatgcggcatgcaggccatgcatgttggacttatttagtgagttagggatcccaagggaagttgtatgcatacgttttccatgttatcgttcactccggacgaggaggaggaggaggaagagcaggagcaggaggaaaagtgtaacctgaaaagcacggcttcatatatagtatgagtcctctctcaataccaaagaaaaacaaaaattcaggaaataagcttccatgcatacaccaaatcattgaaagttcaatcaggagaagaagtactaatgtgtcttggatgattcacatcttaggatcgtgtcggtgagcacattaaactatctatctatccatgtcattgagagtcctcacaatttggacccaatgacacagtcatcaggggcaggcgtgctctatcactaacctaataggtcgtcctgggtgcattcaggtgaagaatattgtttaaaagacttctcgctatgcgaaagaatattattaagaatatgttaatcaattcttttaacgcatgcaccttttctaagttaatagaattttctatattactaattaagaaagcagagtaaggagtacggatgatagaaaacttacttccgcagggaatgtcagcaccttctagggcttggcagcaggcttctgatggcggttcctttggcccaatgtgaatgtgtgacacaaacctgccacaattgaatgcaattgccctattatcaccgcattcaaatggtgtcggtggtgttcctaataatatgccttcagtttctgtttcagctgagatgccaccaagcaccaacattgcaaacactaagctccctctaattcccatcctcacacttaatttcaacttctttctaatccaaaatcaactttgctcacaaattggattgatgacagattattatgctaacaaccctacaattgacatcacgtatttatacaagaaacaaaaggaagccattttttaataaaataaaataacttgtggcgttaaccaactccaagtttatttccttatggttattaaaatgtgattaattaaaaagctgactttctttttaaccatacctgaaccgatacgtttcaatttgggattctttttactccctttctttctcaccttttcgacggccaattttttgaagaaaaaaaggtaacgtgataaaataacatattttattttagaataaattgtaataaagttactcgagaatacaaattatagcaatgtatagtagtcaaataaaaacatttcgtaacacattttactttttttcatcatgttggatttagaattaattctcatttatctactttatacagtgaaaaaaaagtttgtattcaactacaacgtttattttatacactatgaaaagttatgatattttagtattgtaaatttggatatgagtttctatagctctaatgaaaataatattttatatcaggtttcttattgtttctactgacaaatcaccaattattttgataattttttatttttaaatcaagatatttaattttttattctttagaataagtaattttggttcttccatcaaattgataattaattaaccatctaaagtcaaacattggttttgatgtgtcatattggtgtttaggtaatgtttatgtaaataattgacataataattatgagataagaaattaaataaaatgaaaaataaaaaagattttgacagaaattaaacttataaccttttattttaaatataagatattaaatcattaaaatatttattttatttagtttaattttataaacactatttcccatcattagttaagagatattaattttttgaattaaaacaatttaatatataaatatttttaattatattttaaatcattttatatattttaattttaattttaccaatttataactaaatttcataaattaatatataaattatttttcaaatttattttaatacaaattatttttactctaattatataaattgatataattacatcaattaatatgtaaatcatagaaatcacataaatttaatttaatatgtaaattatttttattttaattatatcaattagtaaaattttaatttttaattttttaggaaacttacatgttaatatttttattttaactatataaattatttagttaataattttttaataccaactatataaattaataaaattacataaattaataagtgaattatttataaaaattattttatataatttagaaaaattattagacttcatttttatatataaataatacaaattttattttaattataaaattaataaatttttaattatttaaatattattttaagtttacataaattttataaattacataaaataatttttttgaataatccatacattaatttgtgtaattgttttaaaattataattaataagaaatttttttatatatattataatttataatttatatgaaaataaattttattataaaaataaagacatatgaaattaaatgcataatgcatttaaatatttaaatattttattttaatttaaaaaattataattcaaaattagtagctctttattaattatacatgtaaaatttataaaattaattaaataaaacaaagtatttttaaatttcattgcttgatatttaaataagcaacaaaaaataaaaaaataaaaatcacagatttcaaatttcaaattataaagataccaaaattatatattaacctttattttattaaactcacattttaattaagacacccatgtttgaattttagttccttgcacgggcacggcatttggtttaaacttctttaattgagcttcgggttcaaaatatttctatattattttataatttatataaaataaatgctagttgacgtctatttaaagaattatcaatatatatatatatatatatatatatatacacacgatcatgaatgttgatatatattaaaataattttacatttacaaatatatatcttatatagcttactttatttaaatgtgtgtatgcaataaatattagtttttgtcaatatagttatgcattcaaaatgtgtaatatatatatatatatatatatatatatatatataaagtttttaaaagtaatttaaaagttcttatagcttttattaaacctttacggtcatcgctcgcatcaatgaatctctttcgatatcgtttgacaaatgactccataattaaccttaattatataacagcacaaaaatctacccattatttcccttgggtatacaaactaattaatttcataacaaacaaaaataaagaacttatctttctttacatactagttggtgtacttgggataatccttcttcatatgttaaccttttcactggtgcagcaaataaattcctcatcttactctttatatatatatatatatatatatatatatatatatatatatatatatatatatatatatatattacacatgtaactatatttattttttgaatgcataactatattgataaaaactaatatttcttgcatagacacatttaaataaagtaagctatataagatatatatatatatatatatatatatatatttgtaaatatataattatttgaatatatatcaacattcatgatcgatatcgtatgtatatatatatatatattgataattctttaaatagacgtcaactagcattttttatataaattataaaataatatagaaatatttagaacccaaatttatattttttttaatgagaacaatcttttaaaatatcctcaagtgtcttgtttctttttattttttgaatgatctagtttgattatagtgtcataagaaagaacgatctaatttgatctaccattacaaaaaaaaaatgacatgatttgatatatatagcattattaaaaaataaagttctgtttgagttttttataattagaatgagttaatttgtctaattccatgtaactgagaatcaattaattcctttcaaacattataatttatacataacttcacaagtaaccttacataaccttacatacacagtagcataagaatgtacctattattgtccttggatatacaaactaattaatttcataacaaacaaaagtaaagagttgacccttcttcacacgctagttgcaacccttcatatgtcaaccttttacatgtgcacaaataaatttctcatcttgctcttttatattttattcgaacgaaaacaacctttcacaatatcctaagtgtcttgcttcttttattttttgaatgacctaatttggttcagaatgtcataagaaaaaatgacctaatttgatctagcattacaaatgatataatttgatatagcaccatgaaaaataaagttttgtttgagtttttttttatatatagtttgaatgagtcaatttgtctaattccatgtaattgagaataacctcaactgattccttccaaacattataatttatatatgacttcacaagtaaccttacatacacaatagcacaagaatctacccattattgtccttgggtatacaaactaattaatttcataacaaacaaaagtaaagagttgattcttcttcacacactagttgttgtacttggggtaacccttcatatgtcaaccttttacatgtgcataaataaatttctcatcttgctcttttatattttattcgaacgaaaacaacctttcacaatatcctcagtgtcttgcttcttttattttttgaatgacctaatttgattcagaatgtcataagaaaaaatgacctaatttgatctagcattacaaatgatatgatttgatatagcaccatgaaaataaagtttttgtttgagtttttttatagtttgaatgagtcaatttgtctaatttcatgtaattgagaataacctcaactgattccttccaaacattataatttatacatgacttcacaagtaaccttacatacacggtagcacaagaatctatccgttattgtccttgggtatacaaactaattaatttcataacaaacaaaagtaaagagttgatccttcttcgcacactagttactgtacttggggcaacccttcatatgtcaaccttttacatgtgcacaaataaatttctcatcttgctcttttgtatttttttgaatgagaacaacctttcacaatatcttcaagtgtcttgcttcttttattttttgaatgaccttatttgattcagaatgtcataagaaaaaatgacctaatttgatctagcattacaaatgttatgatttgatatagcaccatgaaaaatgaaattctatttgagtttttcatagttagaatgagtcgatttgtctaatttcatacaattgagaacaatctcaattgattcctttcaaactataaaactatgacctccttattactctaatcccctatgcccctctttccaatccctatgcatgtcttgtcgaacattggttataaattgaacactattattcacaaaaacgaaattgtttaacggaatgaaatataagaaattcatataattgtaacttttcaaatttataaaaaattgatgtctactgggagcaattgcacaaagattttggagataacaactcatatggcacatacatactgaaatattttataggtatcatgcacataggagcatgcataacttcctttttgttgaattaatgtagatatcttttgcattgatgaaccaaaacattaaaaataatgctgacttagaaagtgtattcatggaggaaccaaaaaattaaagcaacaagtgaaaaggcccatgtgacatcaattcaaatggtcacaatctgttcatacatcaaaacattaagatttacctttcctagaaccacacagcaatcactgatcaagtatcgggtaggagcattatctgttgcatctactattatatcatatctaccaaattcacataattacaaagaaaaaaaaaatagtcagtggtaatataaaaaatgaaatgtaaaatgtaagtatagaagaaagaggcctcaagcaaaaagaaaaatcaatcttattatagaaattatacttgctgagaatttccaaagcgttggaagtccgcaaagcttcttcatgttccacaacttgaatagtggagttgatcctaatattcaaaatatcttagttccaagaacaatgatgatacaaatattacaataacaaacatttgaaaaagaaaatttctcatgggattttatttgcagtttgtcaacaaaaattgatgtgatgaatggttggtgaaaaagtaacctacgagcgacaagcagcagcagcagatttcactttcggcttaccaacatatgcgtccgtgtggataacctgaaataaagcaccaacttgtccaaattaataaaaatagtgaagttaattaaaaaaatcagtaaacgaattacacaaacacagaagcaagacacatattaacaccttgtactcgcaaaagtgcaaatgcccaaaggctgatgccagacacaaacacaacaattcacaatgtacgtgttgcaccggctatgccaaaagagggtgggaaggtaaaacagataatacaatacctgcctatgcatattattcagctcaactacgtcatggtcaataacacccaagcgccctgagtatagtttttaaaatgtaagtttcaagaagcatatagactgaggtattattacatattccttttgtcaagaaacatatataacatatatacctagacacaacaactaattagggtacctcatagctcttatcgtccatagtttccaatgccgcatcttctttcgttgatctattgacaccagtatcattcttcgtaagaagatctgagctggtctataaattaacacaacaagaacataattaggtgcccatatatataattaaggtaaaattacaattattaaatctaaggaaatatttaaatgtgagtttggctacatatatagtacatacatcaacatgaaggtcctctacactttgatgatcatcatcaatatcatcatcttcactctcctttctcttctgagcaaaatcaagctcgtccatgacaagtggtgtccttctaaacgacatgactggatcagaagaaaaattttacaggtattattacatattccttttgtcactcttggctttcttttgcttttttgttttttttatctttcttgtctttttatattttttatgaatgaatagccccataaatactgactaatattttgtttcttgaataccttgtttgtttcaaatccccattttatgtatagtcttgaaaatttggttgtactttgacgcattttggtttgtttaaaaaacaattttcaaaacttaatagattttagatgatatatacattgttgagtagtgtaatttttttattataaaaagagagaattaaacatgctcctaatttatttatttttagtttttttttttctcaatgaagaggtgcttctttgacctttgttgcccaccactcactaggatttttttttcttccaggaaatagtttcagcatacccttttatttcacctccaggcctgactcaagcacactcaaatcgagtgtgcaaagctcttgttcttcttcaggtccgctcacatatactttgtctggtctttttctccttttcttcaatgctttcttactaacacatatcttttgctctcatggatatcttacagtgtggcatctcaccccgatataaggatgggattcctccatggtaatgatatttttcttattcacctgaaggaccgtgaacttctgtttggtaaataatattatttatgataaatagtatctttgaaaatttggtcttcaactgagtcaaacggcattgcatgattcatgtatttttgtggttgatgttgttcccaaactttgcttttgtacggtatatgttcaatacatataaaatgattgttgatatcttatcatctcctagatatatttttcctttttttctcactaataaattttcttttgcatttatttaaaattgttataagatattgtaaaagcaaccaattgcaaccaatttaaaaataagaaataatttgttaaactataaaatttcataaaagatgattaaaattgttataagttttcttttgcatttatttctctcctatttcttttaccattcttttttttatcttattttcttttatttttattttattttctctttttcttctccttctccttcctctttttttctttttaactttcttgtatttatcattaagttcatctattatcaacttccaattaatttggattaaatgtaatggtcaaaagaccatacatacataatctaaaatgttttctgcctataaaacagaatcatgcagtcaatttttatgtgcaacttgctctctctctatcttatcataagacttctactttatcttacttgaaaatgaagtttctctctctttcaatttataggtcataccacttgttcttctttcttagcattcagtcatacttatattttttttactgccaatatactttcataagcatccatggacagaaacttttgggcaattgaaaggcatattagttgttcttttgttaatataaaattaaggagattgctttgacattaccatatccgtttcagcagggtttttgctcattgaaactaacactttaaggaaaaagatatgactctgttcactctttacacttacctttttctcatctgcagctcgtatacctctatatatgtatcccttgcttaatacaaccagtatggccaatccatttgagaatatgaggcttaccagtcttggagtcattggtgccttagtgaaggtactacgtccttgctgattctgttattgaatacactagactatgagaagaataattttttatacaacatttatgctgaacagagaataatttcaattagtaaattattgtcacaataaaccctgccataaaaaactaaatactacaataacctcaagtaatatgtcatttaaaaaacagtaataactgattattgattattataaatctgtggcacacaggtaaatgtgtaaatattttagttgccacaaataattagtcttgttataatcttataatgttcatgtagattttcaactatttgttaagtttcaaattcattcctgtaataattttctatgatgtaacaggtacatacaactcaacttgttcggattagttcatcgctagtatcagggaacaaaattttccgaactattttatgcccttcaagatattgttgattttttttcctagtgggatgaagctattgtttttttttttttctgttgcttgtcacatgtacatttatacttgagttttgtcatgtgtttaatttcctttctgttgatatttcaccagtttcataatacagcagctataagtttccttctttcaacagtttcttccgctttgcctgcatagtatgcaaataggcggtgaattgtcaaaaactgtaagtttactgatcttgttttaaaccaatttggttcgataaaatatttatttggatgaattaaacttgatttttatttgtttcatttttctgagttacattttttgggtatgtatgatgaacatgtatgcatgtgaagcatgttccaatacaatgctacataggaggtgtaaggcaattagcataccatttatctgatcaatgagattacaactgaggaaagtggtcttggcataagataaatggatactatgtgaacttggggagggatatcatttaagaactctctttttttcatcttttgaactgttggtcttaatataagttttttttagtggttatcacaggactgttgaaactcttcttgacatatttggttgtagaagagtgctagcaatactccttttaacattctattattggttgaaatttgttgaaaatcacaaattttggtaagttccacttttaaattaggacagagactcatcaaaccagaagtaaaaaccactattataattttcaataaatttaaactaataaaaaaaagaattttaagagattttaagagagtgttgcaaacattcctgttggttgtatcaaaatgcaactcgacaccagtatttgtagttacatgggttgaaataccccgtccttgatacttgagatctaaatctttaaataacacgtttgtttaactcttgcgttgtagttggtggtgcatcgtaaatgttaagccacgtgtttgtttttgccactatctcgtgatcctctttttatgctatcaaaataattgtaatgggaaaatttgtgtgtaatctaatggaagttccaccaactgcaggttggaacctttatagttgaacaaattctgtcggttgaaaatggtatgaaacatatttgtacttcagcagggcgcctttttcaagtatatatagttttcggaacgatggtggtaactcttgttcagcaaccttcatgtcgtcttttgaaggtcattattcgttgttatcttcgtctgtcagaaaatcagaggtttgttaagtagatagtaactccagttttataagtgcttctgcagttctgccaatgccctttacgttcttcccaagtttctaataaaactttggtcatttcaaaatagagcttgtcatgcattaagaacctgtcttccagccgtgttaagagaagctacattcagtagttgccttcgtgtaagtgatattattagtataaaaatttgatttaatcaataagattgaagtgagttgattaagtgaattgaagattaacaatagggcattaacttgtaaagctcgctctcttcaaatttccgagctaaagatttttctcctcttcttatgaagagattattcatggttttaggatgtttacatttttttatgattttggttttatttattcaggaacacccaacagctaggagatggctacagtagttgcttcataatattagagtcaatccggttcttgcacaacaaggtggaggaggatccgatcatatgacggggtcgtgagaacaagactttctggggtttctacatacataaaataggattttcagttgggcatgtatagagagaatgaagaattgaatgggaagggaactatctttccgtttgatgtagtgaaatatacatgagctgatgagcatagtcacctcttaattaaatgcaaatattaaaatcataatgagccatatatttcaaaaataaaaaacttctcttcatctatatggataaaggagattgttagagattaaatataatgagagtaaaataattattcatttttttcttttaaataatagcatgtaaattttgttccatgctattataatatatgcaaccaatagactggaaattttattccattatattccactttatctcattctatttcttttcatcaatccaaacaagtccaaaactcaccaagataagagtaaggaaccaatttgatcattcagttgaccaatagaagaatctcaatcaaaacccattgaaacctcgttgatcaaatcagacctaaacacacaatataaaacatccaagaacatacacacagccaatcatgaactaaaaatgagaaaatagattgaggttttaggatcttaggtaccaatgagtggtccagattcactctccatctaaacataaatttgagcttctagattttaaataattaaagaataggaaaaagtcaacccttcacaaattgacagatgtcgcaagaaggttcaaaattgatttcatatgaatctgaaaaaattgtccaagaagaaaaaaaaaaccttgatttcatatgccaagctgcactatggtctaaacaataagccaattacaacataagatggaagacaccaatttattattattagtaacaaatttaagtataatcaaatttatatatgtatatgaaattttagatagtgtcaaattttaagtaatattaaattttattttaaggtagtgtcaaattttatttttaatcataattaattatataagtatatataattattgataaaaatcccccactaaataactccaattttatttcaaattttatcttatatattgtgtcatgttgcgacaatatagctccgccacttatagttaaatttcaacaccattctctcctacagatatttaccatgctgtaagccccaaatcatcgaggaagcagcagagttttgtgcatccttcaccctagattcttcaaatgttagggatgaaaaatctagggtgaaggatgcacacaaaactttgcaagatccttttgagaaaaagaggaggcaacaaacaccttagcaacacttgcatgtccttcccttaattgttttatatcaacctgcttcgccttcttttggcacatcccatacaacatagtcactattggctccaaaacacccctcacaatcacaattattttcacaaaccaatttttcatcatcttgaatttatacaacaacttcaatgtaaaagtaaaagcttattataaaaatcatttataatagttgtcattcattttcatcataatgaattgattcagcattgcaaatgaaattaaaaaccttgcctgataatcaattataatacttatcattcttatcctatttttgatacaatattaaaaaatattatatactatatttgaatgcaatcttaaaaaatattttatcttattatgtaatgtaattttaaagatttctattatattatgtaatgcaatttctaaaatattttatcctattttttaatgtaatattaaaaaatattatatcctattatattatgtaatataatcttttttattattaaattacttttttaatttttaatatatataataaaatttatattaataaaatttgggggtggcccatcctaacctccctatctcctcccctttccgcaagtcactctcaccctgtctcacttcattccaagtccggtccttcccgattttcttttataaccaagtcaaattccttttagaagtgcgtgtttggataggtaggtcagtagacgggtcacaacatcttgctctcattgagtaggtgggtcacgacatcttggttgctctcattgagtaagtgggtcacgacatcttgctctcattgagtaggtgggacacgacatcttcttgctctcattgtatataactactcaagacatctttttgtagcaaaggcattaaaataaaaaataatagaacaatctaaagaaaaaaaatgataaaataatcaaggataacaagactaaaaattatcaataatatttttagaaagaatatttgtttgtcttaatcataactttttgaagcacaagcagggaaataaagccaagaacaaaccagagccagaagcaaaagcctaatatatatgtatatatatatatatatatatatgtgtgtgtgtgtgtatgcgggtatctatgcatgaacattacagcacgcgtcgaatatattgcctcaataatgtgttctttttttttttggatacaataataatatgattgaattttttaattgaaaaaatgaagtagacattcacttgtgcttgtgggatagtaatttattttccttttaggttgtttcattattatatcgaacaaagaagacgagttaagaatatatatatatatatataaagaccacttaatatatgtccttattaatatctttttatttatattaaaattacttcttaatttatttatgttttttatctgttatttttattaattttttcactcttttataagaaatgatacttttaattagtcttccaaatattttataaataataaatttatttaatatttaaaaatagaaaaaatatttaataaaaaaaactagaaaatcagtatgaagatgttacatgaaattataattaatttaaaaaaatgtgttttgctatctccttgtttaagaaattatatcatttcttcgtaataagtttttgtgcgtgtatcatattaaagttcgaacctagttacggctatgaccttatgtgtattatccaaatctgtcaccactagtctttgtaacaagtgtatcacatgatcttttgaaagaaattatttctttcttttgataaacttacaataagaaaatatgtaatttaaatatttagaacaaattcatatgtttagaatagatctaaaatgaaatagatgtatttagaaattagttgttttaaaagaattctccttaaatatacaatacacatcacattctatttttattttaaaattgaatcaattttgtaagtttaaaaaatacagggatttctcaatgggtaatgttatttcaatacctaaccaaagaacaactacattaccaatagaaaagatagtcgtcattactatagtggaattttggaatttattaacattatctaaaaaggatatcgttaataatcttataggtatggaaactattaaaagaacaccttattgagcactctacaaagcatttgaagtatgagaaagaaatattgttcagataatatttctaaggagttgcaaatggatcaatgagttccccaatcatggatggttctaaaacggctaagttcatgacaatactatctatagttattaaatataaaagattgttggaccatgcatgttctccgtaatgattatgactcatttccttagtcaatttagctcttaatataagatcattcaaaatatactttttattcgtgaaaattgataagtataaaaaaatttacgataactcaaagactctatttaatcaaatgaactaaacccctttacataaatcaataaaacatttgaaagatttgttttatcatttgtcctaacaaatgtaaattatcagcaaatatctaaatgatcattgttaaaagataaataaagataatttattaaaaattaaaatcatcatgtgactattaattaatttttaatcttaattatttaacattatatgactcaaatttatatattttattcttaaatgtttacactaaatatttccccttcaacctttttcatttcataacatattttttatatcattttttattattttttaatttccttttatatatccgtatcaatatttattttttcaattaacctcaactgattccttccaaacattataatttatacatgacttcacaagtaaccttacatacacggtagcacaagaatctacccgttattgtccttgggtatacaaactaattaattttataacaaacaaaagtaaagtgttgatccttcttcacacactgttgctctacttggggcaacccttatatgtcaaccttttacatgtgcacaaataaatttctcatcttgctcttttgtatttttttaatgagaacaaccttttacaatatcctcaagtgtcttgcttcttttattttttgaatgaccttatttgattcagagtgtcataagaaaaaatgacctaatttgatctagtattacaaatgttatgatttgatatagcaccatgaaaaatgaagttctatttgagtttttcataattagaatgagtcgatttgtctaatttcatataattgagaacaatctcaattgattcctttcaaactataaaactatgatctccttattactctaatccctatgcccctctttccaatccctatgcatgtcttgtcaaacattggttataaattgaacactctattattcacaaaaaaaattagtcccaataattatcacacaattactattacattgcatgaaattatttgattaaatttaatttatcattgaacagagtataatttgtatgaataataattttaagttaaatctatataaatttgatcaaattcacgtgcattacaaagtttactttgatattacatattttttcaattattccaaaaaaaacactaaataatttaattaaaccaggaggtcttaatacacaagtttatcgtttatgtgcaaacccataaaaattatgtgtatatcatcacttaacttacatgaccgcctaacagtccttggatgagagaaatatttcggaaattgtttttaacttcaaccctcaaatctttccgtacataaaggttgattaaaaaaataaaacttcaatcgtatgtactaatgaaccgcataatcaagaaaacaaataacgttgtcaacaatcacaaatctgtcatattctaattcgtaaatactttgatgtgccgtatattagccccaataaaaaaacgttaaacgtgtactgcatgttttgaaaattatcgacgattgtgcgatcaaccattgtcatttgtctgaatcataaatcccagaaaacaactttcatttctcaacgatccctaatagtaatatataaatttctcgctacgccatttgcaacgatgaccatcatttacctttcatagacaaattaataatatacgtactaccatttaatctttagatagtgaattccaatcaggcctaaagccttcactgttccttattatatatatatatatatatatatatatatatatatatatatatattagccggccaatactccatagctatggtgaatactatgaatataaatgtaataaaggtattaatacataaataagatgaagaagacggttacggaagaaaaatatcaagagaaaattgtgggtttcatttatttatttattgaaaatattagtgtttttttattttagaggttgaaattatttgtttttattttattaattgtaagtttataattggttgtgtgtaaggatatgagatgtaattgggtttgtgtccaagaatacatgaggtgaatatgatcaatttaacagtaaaaaaccctaccttttataatttaaccttaacaaaaataaacgcaataactatattttctccattactaattataagatgatttcaactaaattatattcattagaaaaagtagttaatcataataaatgtgtcaattatacttttattatcattttaaaatgattttttttcttatttttctatctacttaattatttcttattaatgtttggaaagagaataattaaatgaaaagtatgtaaagaaaaaataataaatatatcttgaaattagaaaaggatcttatgaaaatggacaaacaaatttttaaaaagtagcttataattaaagatgaaaggagtaattttaagaatattgaataaagtgataagaaaaaagaatcttggataaacaattaacctctttggttgttatttaatttattttcggttttatatatttaatatctattggtgcttatagaaattagggtgaagggttgcatgagcttagtctcggtatgcaaattgaaaagtactggagatgttggattaatacatgagaaaaaaaaaatcttttaataaataacttaaaaaatatttactatataacatgaatagctccttaaaacaaatatttcgataagttcaatattttaaaatactccatacattaacattctccgagtaattatctgaattatcaaatagaattgtattaagtattcaatttatttattcatataataatttaaaagaaaattaaaatcatgggatgatatatcactgctatctgaattaacattgagctcggtgtcatacataaaccagtgaaagatatttatttattgtaaaccgaaaaagaaaaacacaatatattggacgcaatgacgcatgcaggccatgtttggcattatttagttatttatggatcccaaggtaagggaagttgtatacttgtatgcatacgtcttcaatgttgacgttcacagcagacgagaagtagcagtgtaatctgaaaaacatggcttaatagtattagtcgtctcaataataataaaaaacaagaaattaggttgcatactgcaaagctttgaaaataagcagagaatattgttgtttatgatctgggtatatattataagaagtaaaaaaattataatatcatccgattaacataaattgtcgaaaatgattaaattattaatattataataattactttagaaattaaatatgtttatgggggagtacttaatttctttttgttgagcccgttaaaatttagatttaaatgcatttttatctcaaatatcataattgtgtgatttgatttctcaatttggacatgatatttgataatatgatgatgtgatgtgtgaaaatataaaaaaaaactgacaaaatgaaaaggataaagattataactctcaatcaaaattccaaaaaaaataatacttaccacaataaattaatagattttttcatatataaatgaaagttatataaatacaaatataccttcaataaaaatcaaaattgcacatatattacttatatatatatatatatatatatatataatttctagtattaacaataatatctttgattaatcttcttttgacatattcatatttgcatgcaatatatttctatttattaaattattaataaatttctaatacaatactaataataatagtattaattaatatatatatctgtattattattattattattattaatatatttagtatatataacctttctgtttagtaataataaatacatgtgcaaatttgatttcatttaaagtaactctcatctatatattagaaaattttattactttagtagtttggtattacgtactattggagcttagggttgaggataattctaagctcatcttggatattttgaaaaaaatgatcctcttatttttacatgtcatgttacaaattacgaacatataattaagcatttataacatcagcctcatatcaatttcaggcgttgtacatcatcggtatagttaaggatcaaaaatcgcaagaagtgcatatatactaataaagcctaaaaagttgtatgtatatttaaggtaaaatgtgttacgtgcatgaagtcaaatagctaggagagggtacgtgacatacatgcataagaattaaaggtgttgttagaagaatggttaaaaaattgaaaggaaaaatatttattaaaaagttcataaaagagcataaaaaatcataaaaatattttatacatttcaataaaaatatatttcttaaattcttgaactaatacagtaaagatattagtatttttgaagaattaattaagaaaagagggaaagatatatatacatacttccgcagcgggttccgggaggaactgattttccacaagacctgaggacatagacaattttttctccgctgaagtatgactgaaaattgccggcaatttggcacatgcaagggacatcaacatctttcagggtgttgcagcaggctgcagatggcggaatcattggcccttggggttcatagtacttctggcattcccgttgaatactaaaaaaaattaccattgcaagcttgacccgatatacgtggcacacctacaatgccagcaaccaccaacattatcgaaaaccctaatctaattccctgcatcctcacactcacactaaccacttcaatggaggattaattatatatgcttgcaattgtggagttgggatcacacactcatatatatagaagaaacagaagggagttattaaattctgattaattcaatatttgactttcttttaacccaaagctgaaaggatacgtttccttaccttttcctcggctaatctcatgaggaaaaaattaaaggtaattttaattaacgtgatattaaaaatctaatgggaaaaagagtatcatacgtctggtgtgggtctgtggttatatgtgtgtgtgtgtgagtgtgtaaaatgatcattacattacaaaaagaaaaactatatcgtaaatataaaatttatcgaatggaccaactaatcaaaaatcaatatttatatgatatttaaaataatattataaaattaataaatttataataatttatgtttaaataatactacctctagctaattcttattataaagtctaaattaaatcatttttaaaagatccaatctaatatgttacttgcattaattgtttttcacaaaatattcttaattaaaatcaatgcttgaatgatgtaaaagtgagaaaaaaaaaaaaatatatatatatatatatatatataaaactgattaatgtttgtaagtttttatcactagagaagttacaaaataatttaagagaaatttaacactctcaattaaattaactattttatataataattttttaactcgtatataagttaaaataattaattttatattaattaaaaaaatagtttacatcataaaaagagtcatcaaaaataaaattaaaattaaataaagaatgttttagaataataatattaaatataataaaattcattaaatttacttatatttaagtctattatataagataattttttgtttataaatgagtccatagtaagtactaattttattcttatttatatgattcaattatttaattcaccagaattaagaaaatatttaaattaactgatgtttatatttggattccttacacgtaggggcacggcattggtttaaattaattaattgagctcgggtccaattatttattcattaattttttctacctttttcacgtgcggtaaagtttgccatacgttttaactagttcaataattaaattactagttggtctttggactatttagaaatttttaagtaaatctctattattattctattttgttgatttattatttttcatcttaaaaaaggagctaagttaagaagaaacatgattatatatatatatatatatattattctattttgttgatttagtatattattattagtattattattattattattattattattattattattataatagtagtaaattaaatgtttaatgttaattgcctcattgatttttatttttttttataatttagatgaatgtgctctgttcgtcgtatcgtaccatcgtgttgatgaaagcacagactattttgcatatgcctaatgttagggtgcccatctataactagagtatgattttcagtagattattaaaagcatttcctactcaataacccaatttttttaatggacctattgccatataagatttaattaaaataattcaccaattttgactccaatgttatcattcaacttaaattcttaattatttagaacaagcctctaattaaccacacatcattattttctgttaagctccttatagttcatagttgcaagaacacacaaatggcagcgtatcaaataagaatagttctcattttaagaatttgaaaagtataaatatatattactcaaccaaatataaatggccaaaattataattcaatttgtggtcacaaaaccacttaaaaaatcatgtgcagtttttttaatcttcaccacttaaatatatatatatatatatatatatatatatatatatcaatatttggaatttttattttcataatatgaagtgttctcatctgatacatcctctctctttctatacataaaaggattaacggattttctctatttttttctctacatctataaatatatatacacaaatatacaagtttttaagaaaatatatgttagtctttataatgggtgaattatctttcatttatttatttaccaaaaaacttatgaaatggaggaaaagaaaacaagagagtcctaactaataaaaatacatatctagtgaaagaacttttatgaaaacatatcaagatatataaaaatggatcacaaatcacaattacacatgactattttagaaggtcacatgacttttttttatctatattttcatttcgattcatattaaaaagtgtttgtgagagtattttaaaaaacttataaaaatatcttccaattggtctaaaatatttcttaactttttttcataaacttttaaaataatttactagagtagcataggagcagcttattggaaggcacacctatgaatcatgttagacacatttatagaggcataaatgtattttttttatacatattatccttttttacatatttatttttcatgttaagcatcgatctttaaatgctgattttttttttgtttttatttgatttttcatatacttatattatttatttatacaagtgaattgtaaatttttaagctgattgatcatgattttactatatatacgattttaatttaacgtcttaatttatattttaatcatgttatgattattaaatatttgaattgttttaaaactactgataagtatatgattttttttaacacttatagcaaaaaataaaaacagattaatagcattcgcattgtaatcttgatgtggtttttctctttgttaaggatatcctctgacaaagcaaagacatagttatttaattacttgcttagttgatttcttaatttatattattttattcagtttttatgtccaccttatgtatattaaatttttttaaagaggtattataaatttattgattactatagattttgagtataggtaattaagatgataacattagtgttattgcatgattccataatcttatcattcaaagaattataacaaaatataattatatcttgtaagtaattggtaaagttatgatgatagcttgttaccaaaaaaatataaaacaaaatgaatcaggccatgagccatgtcaggtaaataaatgtaaaacccagaaaagaaaacccaacaaactgtgacttattttaaataaaacattataatactccaaaaatattttttaaataattcaaataattttagtaaattatcaatcaattaaatgattttgaatataattttgaaatagttacgacaaaaatcagcaattttatcatacacaattatttatgaattatgattaaatactattaagaaaattgtttcactcagtttttcttttgtaagtaaaaaaagttaaactaaaaaactataggaaaacacattaaaaaattatttaaaaatattttttaaataattcaaataattttagtaaattatcaatcaattaaatgattttgaatataattttgaaatagttacgacaaaaatcagcaattttatcatacacaattatttatgaattatgattaaatactattaagaaaattgtttcactcagtttttcttttgtaagtaaaaaaagttaaactaaaaaactataggaaaacacattaaatatttgcattataaaataataaatacgaatgccttgagatatttaattttatctgtagctttaaagtataatattatgaatatatgaatataatttaatgattagaaaatatttcgccttagttcaaggattagaatatatgcattcaaaaaaataatttaagaatgtttccttgaaattgaatattataaatatagtaaaatgtaacaaaatattccttatttaaggatcttgttaatgaataaagtaagaatattttcctgaatattatattttaagtaaaaagataaactcaaaaactcaaatatattttcttttttttgaatagtcaaacatctatctaaatgttattttcattgcttacatgataacataataaaaatttggattctaagtaataaatgctttgatattttatttatatgtttaaaatataatattataaaaaggataaatatatcggtgtaattttaaaagagtaaaatattttttaaaaaaaaaaacagatagatattttaatgatttaagccaaatcaaaagattttattattaagtatttgatttgccacaacttttttaaaaattactatatttttttttgaataatcaatttatatatatatatatatataatataaagcgtaagatcattttctattaacaatttgaatttcgtgtaacatttttagagttaaatcatcctcattttgatcccagcaatcttataaaaatcttagtaatttaatgataataatatatataatataacgcattaagtgtggaatattagcagcaagactataaaagaagacaacaccttggcaaccaagtgcctttcgattaaaactccctaccacagaatgaattctttagcactgtgttccctgttgctctccctttgcttgtttctcattgctcagtctccttccctaacaaatgctagagtgattggtgatggttccgacctaattgcccaaatttgcaatgaaaacccacagaacaaggattgaatgcacgaatattctaagagcagatcctaaagtcctgggtgcaaaaaattttcttgaacttgcagaggcaatcttggagttgggattgaagaagggaatagagggtgaaaactttcttaagggattggaacatgttcccgccattgtaagatgtgaaaattactatgaaagtacggttgaatcgtttaggaattctttgattaagttgaaagacgatcctctaattgctaactatttggccaaaattgctggtgatggacctttgtcatgtgaggaatccttgggtgctgcacatattgttaaccgtgcaatttctactcttgaccaccaaacaaatttgcttagctatattgcatttctagccacagagagacttagttaggcagcaccttcaatctaaggtctcttagtggtttagcatgttctttgttggagagtaattaataaaaatcaaattcaagttttctgctatttgtttgtggggtacgtacgtgtctagctaccaccattatcttttcttgtctatgtacaacattttgtttattgagatatataggtttagtagtgttttttataatttccaattttatctggttaataaaaaataaacataaaaaatgaaataaaagaagttaaaaagaggaatatgtcattgaatttaaacctattaatggtgattagtcgagttttccaagatggtcatcaataatatacaccataccaatgattaaaaaaatgattagtcacgtgtttttttgtcttatttgcctttgatcaattttttgtaacgctgcactaccgaagaacaccatgagcaaacaccatctcacaacttccatgcatgttgactcattctttttctctatttaattggttcttttgatacccaatgctttatcacttgtctatttatctgttgttttgctatatagctttgtttgtggtggattgattataaccctttttccctgttggaatgatgcaattgatataaatttattatcaattaaatatatgttatgcaattagcataaaaaataggctataagttgacagtttaaaatacttttatgaactttatgagctatattgatcttatttacctcaattactatcatacagtggtcaaaccctactcaaccacggccaataagtcacttgcttttcagaagcagtgctttgcatcagtccccaaatcagctaccaccaaattggcttgtatatgatcatatagtattccctaaatattatacttagcaaatcagctcatataacaaaatgcattataaaccgagtgaaataaataccaaatattaactctaattgtctacacacttgataccttttgaatcgtatgaactcaattggcattcttcactaaaattcccaaaccaactcagagatgaaccacagataatggtaagcaatctcgaaggcgtcgggttcccattaggaatattaaatactcttaaactctagcatcagccaatctcaaacagagcctaaactcttcgtctgaagtgttatgggtaaatctttagctacaactccaaccactttttttattatgaattgtcctacttttactttctgttgcatcgtaaagaattaaaaatgttcaatctatggaaggtatctaacaactaaagacatatcatttaaacaaataaataaatttaacataagaatagagtaggacaacagaatagctgaacattaacttttatttatatcttagttgagcatacagagcttattgatgagagatcacccaactaagcttagccttacagaaaatctctaagttaggaaacatatatttctaggaaatggttggtaaattgtcgatccaactatccttattaacgtaagaagctaaagaaaattctttgagttgtaacttatttaatttcttcatccacttaacacgctttgaagtatcagcccctggtcctttgcaatcaacttcagcataagtgaagttactcctacaagaatttgtttaaaaaataagacaaaatgacaaatatggttcaaaaaaattatgaatattacttttaatgtatcctttaagagataatatatttatttaaacttactcatggccagtataattccaagcgttccatccttgaggagttaccagagaggaaaaatatgttccatgaaatatgactctggagtaaggacgccaagctcttcctaaattcaccttcccatccccaaaaagggaacctccttcaaatacaaaaccacttggatcatcttgtgactttcgtccttgagctgtaacaaaacctggtccagtcctatttattccaacagcattgatcgagcaattctataagtggaaaaaaaaaattaaaaatattttattatttcatgtttaaaatgatttattttgaaaaagtatatttatgtaattacctcgtaaaatgattgtccataaccaaagataaaatccacttctccttcaatgtaacaatctttgaaataatgacgtccccttgcgtcaaataaggtgtcttgataaccaatgaaattacatctaaagaagaaggatttgtctccatatattcttgctgccaatgcttgtctaatattaattttacggtttcttctcctattcatgttgttatatgtgttctgcagttaaataaaaatacattagaaagaagaagaagaaaataatagtgaaaagttattaaaatgttttttctatcatttgttatgtaccatgaaaccaatgttagtcacaaccacattagttggccatgaagtgaatgtagcgctagtgtccattactttgtagtcccagaaagttatgattgttgtctggctgccctctccttctaaaatgatgcagggcttttcttggggaatataaatctttcctctgcacaattagaatatgggaataacaatatacatttggaaaggcgagtatatttctaaaatgcgatccaaattcaagaaaaaagtacacatgaaaaaaatccaaacaatatgggtattgtcttcatattagtagaaagaaagaaaaatacccagccaaatttgaaaagaaacatgataggcttagaacatgaaaggagccataaaatcaaccaatgactagttaagaaagttctttttctaggcaattagtttgttgaacatgcatacattcagaattatatgtctggtgtgtgtatgtggatttcttgaagctcttttagtaggaggagtcatttgtagcaaactaagatgaattaagagtaatcttaattgttataaatgattatgaaataaaccaagtattgctgttgaaaaatggaagaaggtagtatgatgttactacataaacgaagttgtattttcctgaagtttcagccatgaagaagctgaaatggactctagtgaatgaaaactgctgataaattgattttgatcaatgcctttttagcagaaaagaaaaggaattggtcctgttttggtccaagatcagaaattctaaaaaaaaaatggtcagccaaaaaaaggtgttttatttaaagggtaccaaaggcaagtacatgttgtataattagtagaactaaagcccccctgcagtggtatttgccctgcattccaaacaatacccacaatttcacgtaactatttctcttctcctttgcccctacccgagactatgttgttgctgcaccattgtgtataaatacatgtattccacaaggatgcatcacacaaaccatcagataccagataattagtagttcatatttgtaaacgttgcaaataagtaaattgtgaactaacttgatgccccctttttgactttccgcaagacattaaattgtttcattgtttttagttgttaagtaaatttccgatagatatgttgtctgcctattgtatgagtactattcttgtatgatttaaatcttgaatgcttccttattaagtaaatataacttatagttaagtgggcttgctttaattgcatttgttcatgtattcatctgtgttgtatgatttatatatacaagctttaacatctaaaggaatttgtaccaccatttcatggagcttgagattatgtagcatgtagtagcattatacataatgatattggcttactgatgttatgtgatattgattatgaaatggattaggaaatacagtttggttcatttttttattaaaaaaaaaaaaaaaaaacagaaccatgcacacgtctagactaaacattaaacaatactttggaaagaacaaaccaatacttaataataacatttcaattcaacttacgtgtataagccagcttgcatatgaatcttgacccaccgatcattgttgtttcttatcgaaccaattgcagcttgaattgatccgaatgttacgttgccatgcccaccaacagttatggtgtatgaaatgtccttcccgccacaatctattttaccaagaaaaaaaaaaaaagttaataaaccaacaagaaaaacaatatactttggaaaattgaattgcttttgtaataaatagtaataaattacaaggaagttggttgcttctgtaatttatgtgaaacaaatttaatcttatgtttgtttgaacgaagaacgagaaaaaattacaaaatttgaattgaaagggggaaaaaattaatagagaaatcttgaaattttgtttctttttattaaaacatattattattttttccttttttccccctctttatgtgaacttaacatagtataaaccataggtaatagacatcacattacatctaaatgaaaagttttgaaccaaatttaacaaactgattttttttttactttctcatttctaaaacaattttgaaaataaaattacgaaacagattttatatttttacagttgatttacaaaatagtttttaagaactaaaaagaaaaacaaaataataacttttatagtaaaaaaaatgaatatcagtgtgttgcttcttttgttcggatcagaaagtgtgctaagctttgaacgaagaaagaatggatggattatcgtaattaagaaagtaactttattaattattacttgaaagtataaatcttattaattaagctatactagtaaaaaaaatgtcagccaagggaaattcattaaagaggtaccgaaaggaatcagaccaagcaattggtttgtgcacttcatagtccccttctcgcatatatgagatatcagatatacatataaactccccatcaaagctaaccaactatgaacaatgacatacagttcataataaaagacttctacaaaaacgttcctaccaacatgaattctctactgagtccctgccaaggtttgtgttgctagctatatccaaatatatatatatatatatatatatatatatatatagcattccaaatccgagatgtgtttccacgtacaagtctttttaccaacccatcaaacaaattagtgctgattaatccaatcatacgtcacgcccaggacttcaattgtaccatatatatcccaaaccaagtaaatacatgaaagaagaacatgcatggatcatacctccacttcgagctgatatcatatgcatgccaccaaacaatggcattattgccaacaccaagcacccagggatgatgatattcatgactccaaataaaactttaaactttggttcaaaatgaaacttgagaggttaattcgttcaaaagaattgcaaagatataaggggatgatgagaggggaaaagagttctcataaaaaatgtacgttagtttatggcatatgtcaacaccagtgattcttaaaatgttattgattaacatttttagaaaaagctgagcataccttatagtagtaattcttttattaacgttacggtccatacacggtatataattcctataactttgggtaatgatgtcccacttttgacaacgatacggtagatacctatgtctatgtatattcttaacaacgccggtgtatattctacttgtgagaaaaaatcctgcatgaacaattttgctagaagtgcatacatttccaaagttggctccatgccccttgttttgagtttgttaccttccggtttctgctctcgtgagtcatatacattctactaatggcaatggaaaacacggaaatttttcatccagcttccttcaattaattaacatattgcttcattaattagagatgtaaaatttgatgctggccggttaggatccgtgactaagtttctcttctttttttcctgttttgtcctctattctccttggtggtttatggtacaccacaaataatgatcattagattgatctcatgtccacaaaactatgatgcaccctctgcatcaatgcaccaacgttcttcctctcctcagtgtcatatagtttgagactcaaaactgcagaggatctgaatttttggtgtcaaccaagtttccagaatgttagcttgttcaaaaaaaaaaaaaaaaaaaaaacttgttcattatttataattccaagtttcgaacgataaacccttttccatcttttgaattacttcaatctcaacgtgtttggtggcgtaaatggaaattcagagaccgtaagaaacacctcctagtttggacgatgcagtggcgaaaacgtcttggtcgttttgggcttgtcggaggaggtgcattataacttctcatacaactaggaagtttaacggtccatattataaacaaaatatatgatcaccataagtcacttattctactactctaccttagcatcagtattgtacaaattgtctaggccatgtaaaaaaagaagtaagagaatatgatttacttcttgtttgactttctcatgtaatcttataaattaattttttatcttttaaattttgttcaatttgattcttcccttaatttataactattttgttaataattctaagataatgaataaggatggcaatgaaatccgttctagtggattctcgttccgactttgacaattaatacctaagttgatcggatacgggttcgaggattatccgacttttttaatcaaggttggggttagagatgagaatgtcactatcagcctggtagtcatatttatacccgtcaatcagtttatttttttgtagacaaatgtcctataatgaatttattgataaataagtagttaaaataaatatgtaacaatgaatttattttttctaaaataagatttttaatatattttttacaaaaaatattttacaaatctgaaccatagatggggcaggaacatggatacttgacacccaacgggtacaaaaatgagaaatcaaattttaacatgtcaaatatcgataacaagtacgaagataagttggaaagtcgagaactcaggagacaataaccttccccgcccgatccaattgtcatgtctaataatgaaatatgtcacaaaataaaatttattggcttggacgtgtttcttcaagtgtaattaatatagtgataaattttaatatatatatatatatatatagcaattattttgagaatgacgtgtttaaaaaaatcttcttttattataaagtaaatagattatgatgttatgtgtgaaaatattaaaaaattgataaataaatacaaatataccttaaaaaaaatcaaaattgtgtgtgcgcgcatatatatatatatatatatataatttatagtattaataataatatcttttattaatcttcttttgacgtatttatatttgcattcaatatattaatatttattaaattattaataaatttctaatataatactgataataatagtattaatatatatctgtaatattattaatattaatatatatatatatatgtcaatatttgtaatttttattttcataatacgaagtggtttcatttgatatatcctctttctctttatatataatggactatgatttttctatttatttttctctacatctataaatatatatacaagtttttaagaatatatatatatatatatatatatatatatatatatatatatattagtctttataatgggtgtattatcttccttttatttatttatcaaaaaacttatgaaatggagaaaaagaaaataagagaattctaactcatataaaatgacatatcaagtgagataacttttattataacgtatcaagatatataaaaatagatcacaattacacataactattttaaaagttcacaagacttattgatctatatttcatttacgatagcttataaacaaattatttagattcatattataaatttttgtgagagtatttaaaaaaaaaacttataaaaatatatatctttcaactgctctaagatacttttaacttttttttcataaactcttaaaataacttacaagagtagcatatgtgtagcttattggaaggcacactggtgaatcatgttaggcacatttatagaggcataaatgtattttttatacatatttatcattttatacatatttatttttcgcgttaagcatctttaaatgatgaaattttttttgtttttatttagcctttcatatactttttatttatacatgtgaattgtatatttttaagcttattgatcattaaatatatatcatgttagacacatttttatttagcctttcatatactatatatatgattttaattttaacatcttaatttatattttaatttaattatgttatgattattaaatatctgaattgttttaaaactactgaaagctatatgattttttaacacagagtaaagaataaaagcaaactaataacattcgcagagtaatcttgatgtgatttttctcttggttaaggatatcctctgaagaagacatagttatatacttgcttccttattttatattattttatttagtttttatttcaaccttaattatttatattaaaaaaatttaaagaggtattatagatttgttaattactatagattttgagtataggtaattaagatgataacatattagtgttattgcagggatagctatcattcaaagaattataacaaaatataatgatatcttgtaagaaattggtaaagttgtttaacaaacagaattttttttactttctcatttctaaaacaattttcaaaataaaattacaaaacagattttatttttttataattgatttacaaaatagtttttaaaaactaaaaagaaaaacgaaacaatatcttttataataaaaaaatgaataccagtgtgttgcttcttttgtttgtgcacttcatagtccccttcccacatgagatgtcagatatacatataaactccccattaaagctaacaaactatgaataattacatacagttcataataaaagacgttcctaccaacacgaattctctactgagtccctgccaaggtttgtttgtgtttctatatccaaatatatatatgtgtgtgtgtgtcaaacactagtgtataattcttaaaatgttattgattaacattttaagaaaaagctgaacataccttatagtagtaattcttttattaacgttacggtccattataattcctaaaactttgggcaatgatgtcccacttttgccccagtaatttaatgattagaaagtatttccttatttaaaggattagaaattatgcattcaaaaaaaaaaattaagaatatttccttgaatatttataaatatagttaaatgtaacaaaatatttcttatttaaggatattgttgatgagtaaagtaagaatattttcctgaatattatatttttaagtaaaaagataagccaaatatactctctttttttaatattcaaacatctatctaaatctcattttaattgcttacatgataacacaataaatatttggattctaagtaataaatgcattagatatatataatatagataaaacgtaagatcattttctattaacaatttgaatttggtgtaacatttttagagttaaatcatcgtcattttgaatttttgatcccatcaatctgataaaaatcttaataatttattgattataatatatatgataaaacgcattaattgtggaatgttagcagcaagactataaaagaagacaacaccttggaaacttaatttactccacaccgactgcaaccaagtgccctttgattaaaacaactccctaccacaaaatgaattctttagtactgtgttccctattgctcaccctttgtttcttcctcattgctcagtctccttcgctaacaaatgctagagatcttcataatggttacgtcctaattgcccaaaccccaaatttgcaatgaaaaccaaccgaacaagattgcatgcacgaatcttctaagagcagatcctaaagtcctgggtgcaacaaattttcttgaacttgcagaggcaatcttggagttgggctggaagaagggaatagagggtgaacagtttcttatggtattggggacgacaaaagatgttcccgccgccattgcaaggtgtgcaatttactatggaagtacggttgattcgtttaggaattctttgagtaagttgaaagacgatcctcgaattgctgactatttggccaaaattgctggtgatggacctaaatcatgtgaggaaggcttgcgttctgcacatattgttaaccgtgcaatttcggctcttgaccgccaaacaaatttgcttagctatattgcatctctagccacagatagacttattaaggcatagttgcaccttcaatctaaaatgtcttactggtttaattagcatcttctttgttggagagagtaattaataaaaatcaaaatcaagttttctgctatttgtttttggggtacgtaagtgtttaccattatcttttcttgagaaagttttaagtagacatgatgagtgtctagttcgagttttatgattgagagaagagaaatttattaaaggtgataagttaatttttttgacaaagatgatcatcaataaaataatttatatcaatatcatgattacaaaaataaatcatgaagtttaatggtaatgaaatgataatacaaaatactctaaccaatatcaaagaaaaatattacttccaactgcttaaaaaaattgttgaagctctcacctcaattagatagtagtttaatggtaatgaaatgataatacaaaatagttttttttttatgtatttcaaggtaatcttataaaagttaacaaacttatcatttagatttaatttgactttttatcttttaaattttgttcgatttgattcttccctcaacttagaactatgttgttaataattctaagataatgaatagacatggcaatgaaacccatagccgaaggtaccagccttgactttgacaaggaatacttgagttgatcaggtaccggttcaggtttaaagattattcgacttttttaatcgaggtcgggtcaaggatggagatgttactatccgcctcatactgatacccatacttgctaatcagtttatttttgtagacaaatgttctttaatgaatttattgatatataagtagttaaaaataaatgtgtaacaatcaatttattttttctaaaatcagatttttaatataattttttacaaaaaaaaaaaaatcacaaatctgaaccggacacaaaaatacccgatatctaacatatacgagaatgagataacaaatttcaacccatcgaatataggagacgcatacgagatatgttgggatagtcggagtcggaaattgagtagccaatattcatcatccctaccttgtccgttgccatgtttgataatgaaatgtcacaaaaaaaattggcttggacgtgtttatgcaagtgtaattaatataataataaattttaatatataaatattatatatatatatataccaattattcacataatggcgtgtttaaaaatcatcttctttgattataaagtaaatagattatgaattgtttactgaatattataaattctttgaaatttaagccagtatataagactatcacatgaaaattctggattttgggattcatttctactgatccgttagatgtcaaacatgtgaattggaataacagtcatacgctaaacatttcaattagggcaggataaaatttggtcgtcaagcgtcacataatttgtatggggagatgagatccgtttaaatcgatataagaattgatagtttcacatcatttaataaatttttattggataagtattttacaaaatacaccgttagattgaaagcttatattatatagatcacatgtctcaaatttcatattaatccgaaatcatttgatacctaattgatatatataaaattaacataatatatacttctaaaatatgtgaaaattagactatttgattacatttctattgatgtttaaattttgtgaaatttgaaaatgtgatttatatgatataaactttcaatctaactatggattttgtaaaatacttattcaataaaaagttattaaatagtgtaaaactatcaattcttacacaggtataaactgatcacatctcttgtatggttgttgttggttgttattctaaaggctaaaatatgtttgatacgttttccattcctataaaattattaaaatttatttaactttgtacaaaaaaaattattttttatcctcgcaaattaaaaatatgatattttgaatcgaaactaaatttaattatgttcaaatttacgtgttgatgactaaacacataaaacctagtaaccaataagacgttgacatatgtttaaatccaatatgtgattcaacaccaaatctccccttccctccctcgtgctcttctccccatgactccgacaatgacacataaaacctagtcatgctcactttgcaatccaaccaactctgaaatttcaaatttttttggagacactcacttacgttctcgccttcgagacgctatattctctcatctctgcgattcaagttccggtttgggggatagggatctgggagttagaggtggtggttgttttagttcgaggtgtggcggtgacggtggtttaaggtgcagaggttatagcttattcttacaaaaaaaaaattataatttgtgacaatttttttaatagtcacaagtttttattttttctgcaatttctagtgggtttaaaaatccgctaaaattgtatattaaaatttaaattaaataaaataccacacggattagaattcgccaaaacctagctctagataaaaagtcacattttaattttgcaagaaccaaaaaagggacaaaaattttaaaggaacaaaaacaaactttgataattttaggtgaacgaaaaatatattttactctaatataaaataatagactcacggaaaaaaattcatgctaacctgaccaaataaaaaattctatattagtattaaaataaaatttaaacaaataatgaaaggttcaaaaatgtcagataatatattttacggttgtaccattcattttcttatgccctttttgacgacaaatatttgtaagtaataacttactttcaaagttccatttcacacattttgaaagtgccccactcagctatcttttccattattctcttcatcctcgattgcgtgggttacaccaacttccgctggccgaataacacgatcataaagcatatatcctgcctgcaaacacaatcataagatacccttttattcatgttttcaatctcctaaataatctgcccaacaaaagtaagaataagaccacattccttcaagaaaagtatcagatgattgggttaaaaaaacataaaagctttgtcataaacactgacaaagatcaaccagtacttgacgcactgcaaatctatagataattaaccaaactgtgttgcatatccaacacgattcaatatgatatgcaagagaaatgtttgcaaaacaccttttattattaggtgagttgcactcgagtcccactaaataaagtagggaccagagttattttaatgacaccaacatgaaacaaatcgaataaagcatgttaaaaaagtgttgctagctcctccaataagcaaataggaatattttaaaacaaaataaaatacattatggtaatatatattgaataaatatttgtatatctgtaactaaattaaatttattcagttgttattctttgtgatgattcttaggatggtaagatagcaagagtgagaagtgctttgctggaaggtgaagggtgagaagttgagagcatgacctggatttgaatctcagtagaaaagatatagtaacaacaaaaatacgaattcaatattgttggatatggctcatctttcgcagtcagatgacaacccttcttgttggcggggtcagcagaaagccaactggggtcccgctcttttctgtttttcgaattgtgtgtgattgtcgatttccaacaaatattaccataaaagtaacagtgttgaatatgaatatgatatagatatgccaccaattttcaagtaaccatgcatcatagacaaaaagagcatatcaagagttttgagtgtcaaaacaaattttaaaattggaaaaattgaatcacagtccttccactgtatattaccttcagaacagctgcaacagttcctggaggcttagaaccatcggggatttggaagatggcattatgcctgtgtggatcaaagggctcgtttgtaggatcaaacttttctacaccaaacttttttagtacctgtaaaccgaagcaattagttttacaataggctgaagcctgaagcactttactgtccaaggaagcatattatttcaagcatacaataatatattgtatagtaaaatgaggagtggcaccacactctctaacacactcttattgataaaaatttattgaaaactacaaaatcatgaatgagattcattaaatatggagtggaacccaaacatttttgtgatttccgacaaattaaagccaatataagactgttagaaagagtgtacttctcatagtaaaatataactggaaaaaacttttgtagtatgattataagttgagtttgaaacatgaaggaactaaagtccttccccaaattccccagttcccaacacacccatcaattcatcaaaattcaaaaggtaaactaaatatccaatttacaatcaagccactgtaaatcaagtgctttcagtacaaaataattattctttttttaaaataacaattcataaaatagttatgagaaattggaataagaaaataatttccaacatgttcatgatttaaaaaaaaaaaaaaaacatcatttaacacagaaaaaaaaacaagccccacctaatctcacagcacctgaacaaccatgtcctcaaacttttgcataaagcctctactcctagtccctccaaatcacttttaccgtaccctcacattcactcaattaaccatcaatcgactatcattactaaacaaaactatataaatgaggaatttagatagctgaaaagaaatggggattaaaacttaaatataaaaatgagtagaaagaaaatattgataatagattagctatgacttttgaaattaaacagataaaacaaaaagtataacattctacctctgataattgtttctcagtcatttcaacaccttgtagaagtgttttcaggagtttcaccgcttcagcagagtcaccagccgtatcaatttttgaaaatttttcctttgcaactgaggaagctcttcccaaattgtccgcaacatccagtaaactctttgcaaaattctacagcatatttaaaccactcagaacacagttgaaggggaaatcatttgggacaaaagggatcaaagttggacctgtaaagcaaatttttttgaattatctgcttcacgtctagtcctttccatgacattctccatctctgcataagtacgcagaactttatcctgcattttttcaatctccttgtgctttaaggtcacaagttcttccttttcaaccacaagtttaattaaatcatccctggataagtcactttcactctctgaatctgaatcagaaaatgcagtccgtttaaaacctctcctccttcttttgacagtttgagattgagaatctgaaatagaacctgattcctctgttttatctgcaggtttatcttgtttagcctgatcattattctttgcctcttcatttacttttgcagggtcatcatttgtagaatcttcattatgcacattatttcctttttccttgtcattattttcggttgaagctgatgaagaaaacccaaatcttggagctaataatgaatctattggtggcagcaacaaattgatttgaacaggaatcacctggaacattagaaagcatgagaattttaaaatacatcaccaaaattcattagataaaaataattgaatcctagagaataggctaatgatagtcaccaatcaccatataatcatatttcatagtatcatatactacatcagaagaacaaaaaaatttggggaacctattgttccttcgtacacacaaggaatttaaaacaccggtaatccttaggaaaaatattttaaaaaaatgacagcgaacaagaatgagaatggggatagaatttagaagacaggacaggacataacatagtaagataaaagctcaggcacaatgttctttatcaagagaaaaaagttatactcatatttcatcgaccacttttttcattaaatacttatttccacacaagagaaaacactttttataacatttttttctcttttaatgtaataaaacacaacacacctgataaaaccctggcaaaaatggacaatcaaagtgaacagcagaaaaatgacagaagacatttcatcctgatattgtttttctaaaccctaaaatgacataaataaaatttctgaacatttgaattcaaaaccaatagctaaaacagataaattagcatcaaaagaggtacaaaagcaacaattaggggtaacactctataatgcaacctattccaaactgcataaattacgaatttctgatacacaatctgtcatgatccctaattaaaaaaaaaaaaaaatcatcactgaaaattctaggcaccttagttcaaaagttaatatattattcaaaaatacagctgaattcaaaaatcaatgaacagaatccaatcgaatgaaatagcgaaacggctaaaacagtcaaattaaaaagcaacctccttaaaccctggcaaaaccctaaaaccaaaaaaagaggggaaatcaaaggattttgggaaagtgtggaagagcaccttgttgggtgaatggggaagaagggaatgtaagttaatattggagagggtggacaagtgttggggtgtttgcgaagcagagaggagagaggttcggaaaatggtggtggaaacacgggacaaaaccctatgaacgaacatcgttgaggacgaagaagaagaaaagttgtcgaataacagaacagaacagagtgtttatgcaaaaacagagaaaagagaacagcaaagtctgtgctcgcggtggagagagaaaaacataaattggtgaggttatttattcattataaacgacgtcgcctctaagcaatacatctccaaattttaactggagtctgggaggattgttaacagcacacttttctttaattaacacctattcatatctctcgctgcatagccattaaatttattattattgtttaagatttattgaaaatgaataaataaaaaataatctcaataacattctaaacaagatgggataaaaaaattggttaacaaattttcatgggaggacaatcaaattttaaaaaaaaacgattgaataattttttttataatgatcactattttaaaaagaaataatacatataacatacttaacgaaaattctctaaagagattgacaaaattaggaattaaattttatttataaaaatatagaattatttaagattatttgttttaggaggattatttattttttaagcaacggcacttgttatgaatatcatctatgttaaacaattactctgcttacccttttttctaccatgcatcgtaatcgtaatggcaggtaaatattttaataaaatcctaaatttacacaaccaaaccaaattatatcatgactaatagtaatagctacattttatccaacaacgatagaaagcaaaagttcaaaacaatagaatagagtgtttgtagtgaataagtgtatcaggaacatagcatagcatgggccatgggcatggctttcactagagccgaaaatgtttttcctaaaagaagaagatgactaacaagctgcagcactccattgttcttcaaattgaacatgttggcacctccgaaatcatggattccatgtcacgctccttggaaaatttaaaggtgctacaatcaccaacacgaaaagctttgttgcatttgggtccggatcctctcttatttacgtaacctggatagtcccatctaaaaaatggcactttctcaaccaagaataactctgcttcctctgccagtgtcactacttctcagttattaaaagggtgagcattcttcggtgtcatgtgaatttctccatcttggcttaccatctatcttccttgcactcttcaaaaaccccgacaccacgtgcttctgaagcctaagttaaatagaaatacgtttagaacgtgtgtatataaaacattttatgttttcaatatttggtgtagtagtattgttcttcctataaacttactcaatctggcacggatcatgttccctataaacaaaaccagcatgtggaaaattgaagacagtgcgatcaaaatatttccttcggagcagcgggtgtttgttcatggtatgaacatccacttcatgcacaatggtgtaaccaaggttctccaatttgttttaagtttgttgaagccctggactggagtactaccctattaatgtcactaattaaagattcatcgtttaactagaaaaaatggttagaatcaatccacaaacacataacaaacgcagtggtttctaaatgagataataatgtgtctcaccaactattaatgactcacccataattttatgttgttttctataaattgagtcaaatctcatgagataacctacagttttaaaaaattattagaaattatgttagagtttgtttggatataatgttataagtgcttgagagtttatttgttgaaaaaaaaatattttcaatagaaaaattttcaaaaacacttgtaacttgtatctaagtagacacttactacttgtttcttttatatatttcagttatgacaaaaaaaaattgccagtaatagactttcatacccgttttagttgaaatttattagaatatactaagttttactccatgtatgaaaagtttcatacaaagaatgtttgccagcatttttcgaaaataatgcttattagttgaaaaacactcggtaatagtatttagtaatggtttagatgaaattgtttaatccgaactctgatgattatgggtccactctattcctacattatttcctacattattcttgcagcagctcgggtgagttagaagggaataagaatacatgaaagttgacatcatccatggttttaacaaaacccaaaaagtctattttaaccaaattcgacttgtaggtagttgtgtcatttggccactcggtacatacataaaatgagtatatgcagcaacggattatttcaatatttcaattaggtgaccaaaatatcccaaggtcatcatttcaaattagtgaactgactaacggaggtactctcacatatcaggtttaattagaaaaattaggtactaatccaagattcaaacttaccaaagcaatacatttccttgacgactagaccaacctgttaatcattatatttagctacactaaacacaacgggcttgatgcaaacaagtaattgtgttttgtctttattttctgtcttgacacttgattgtagatgacaaaatattcataaatacaaaaacatatattgaattataaaacttcctactagaaaagaacggcgacgcatggtacataaagatctcatgacgcacatgcattgcataaagaccccgtaaaatttgtatgctacaaatgtcactaactaatctaattatagcactgactcaattgctcagaaatttaatcatagggattcctaaaattcttcaagagattgggaatgtcgtaagctaacatgtcatcaactgcttgtatcatttttggtttcaatttttcaaacttatcaatattgtaaccactcaatctctctctgaaaaactctacatttggaaaatcgccaggaggtaaatggaactccctttgtacctgtttcaaagttgtcagtcatgtgtatacattttaagtgttgtcagagacaagcagataagcaaaacggatgtacacagattcatacctttccaaattcagctgccaaattatcgatgagcttttgttgagctttagctttgcccatcatagcaggcatctcctttttaagatgactgataatgtaagcatgtatcttggctgctcgggcccgttttacaaactcattgatctataacagtcaatatatacaaatgataaattaattatgcaaaaaagtaactttaacaatttaaatataaactggacactgaaattgaagatacgagatagtcacctacaaaaaacacctgtagaatttataccataggaaaggagactattgtatcaaacttgtgtgtggagtgcggatgacactaaaagctgataacattagttttcttaatttttaatttcacaaaagaaaaaacaatctaatcgatacgctggctttcttgtagtttcactaaaaaacaatctaatgacactaaaaaactattgtatataagggtagttttttaaactcttttcaaaactaataactcttttttaggtccatctttaagttgtttcaattttttactttcagtttgtattactaatgttctttcttgcactttcacattttccccactctttctgaaaattagttcttgaaaaatgttttataaaatagtttttaaaaactaaaccaaaaacacaaccaaacacacccaaagtaacctcattttagtggaaaactattcttatgataaagaaaataaatttagttaaataactcactcactcttcgatcacaagctgcttttggtacatctttcagatccgagagaagatcatcctgttccttttcaaagagttccttcccaagtggaccagtggcagcatcatttacaggtttgtcattgaaggagcttccataaagaaggttaattatgagcaaatgagcacatggcaatctcataaacaaggaaataaatatacagttatattatgtctaattgcatagcaaatggggaaggcggtgtggaagagatcttccactgagagtggagaaacaaagcagtctctcccccaccctccataacaaagacaacacttgaacattgagtggagacatacccaatatacactcgcattacttcaggtgtcttcagcaccttcccaagtgaccacattaaggctccataaaccctcatcaactgcaacagagagcccaatataggttaagatttcaccggactaggttgtgaaagattcaaaagataaacaaacagaagtttgactacacaagctcttacttgttgagtatcaacttggtctgccttgttcaaaactactcggattttgtcatcatgcccccgtaaggatgatatcacacgattgaactcatcactgatgtccagtttgtgaggatcaaacagaaggagtatcaaatcacacttagcagcaaaccaagatgttacacccgtaaaatcatatgctcgttgtgtacgttgcttttctccagatagaactccaggagtgtcaacaaatgtgatgtgttccagtagctttggacaattgaaagagtcaattctaaatgctataaagggaaatctcgtaaactttttgaacagatctagatcaacttacaggatgaggcatttgtgaacacacaaattttgacaaaaatgctgtgccaaaagttgtaagaccactaaatggcatgtctgcttggacagcaacagtatttccgggaacgcttctctcatcagatccagactgtacatcagcatcctttgctagttaaagtataaaactaatgcaataactcattttcaagatgactactagattaaaggattattaagaaaataatttaaaccatcaactcttggcactaatgctatggtacgaactactgagttccattgccaagttttagaattttcatgttatgaagaatagacacacaaacacagggcgatgtcctaaacatgtgtgagcatgagcgtttgcatgtcaaatggaattaaaaaagattaacatcacaaaatatctaaattgagaatctgaatttatattcaccctctcaaaataacttgttaagctttacttatgccctactataatgagccccacacaaaaaaaaatattaagaagcatcattttacattttccctaaagaagtttctttagcattttgtatcttttaaatagtttatattattctttatattttaagttgatttctgaaagttaaaacattttttcaaatttataaaatagccttgtcttttgaagtctcaagcgatatttaggtgtcagttgacagagttgaatgaccaaaccatgttaacgcatgtccaagccatcaacaaaaaattaattaaacaccagtttagtagcgtccaacacatgtcatacaaatgttaaagaagtgctagtgttggaacttggaagtatgactgacactctgacactgcaagaaatagcagtgttgatgcttcatagcttccaccaagatgttagtcttgccagcaattagaagtcaaattgatttattagtttaaaactaagaaaacattgaaggtaatagagagtcgtgggagataaattgatttggcttacacataccatgacaacaacaaacctatcagttgttggttcaggcccaatatgtgctcctatcaacatttatgggaaaaacaagacaaagattaataacattattttaaaaaatatgttatatcaccctattaatcatcctaaaattttacaaagaatattaaataaaataaataaatgtatttaaaattatttcttcataaaacagaaataagcaatgtgagaaatacatatatggatatagtgaaaggagaatcacgtgcctggataactacttttaagcagatgtttgataaatgttgttttaccagttgagtactgacccaaaagcataaccattggtttggcatcaaagtcactgtttgtctacaatatgaaaagaattacaatcaataacaaaattaattgtatatctttgtagatatttaaaacatagtgacaacatgagtgcataaagaaaggtagagtagctagtcatttctaaacaaaataacttactgaccagtaatggggatacaaaatcattaaaacggtaagtaacttctaatggcttcaacttctgaatgtagagtctcttcaagccgtcaattattgatgtcacagaggaaagaggcacctatgaacatatgtaccacaaatacaagtaaaaacacaacaaaaataatatttgacaattttaaaaaactggcaataataaagaggtaacaaatacagataaaaggtcctagagaacatatctataggatgacctttagggtaacattaacttgattcatataacattagagacaaaattagatatttagattgacacgagacaaaatgcacattttgttaagtcaaaaagaagaaattagataataccaattctagattgacacaacaatattcacatgtgtagtatcaggcacattactattattggctaataatatcagttacacatgcattgaaattaaataataaggttggtttcaggcccgaaataattacttaaacacatttgtttcatcatcttataaaagacagagaacaacataaccagaagtttctcacatatactctgcaagatcaaaagaaaacactaaacgaaaccagaacaacctaaagccagtaaagaatgacaatcaagttggccattacccattagttgaaaacttgaaatgaattctagtggactggaaggtaaggataatgcacatgaaatcaatcaaagtaacagtaacagaatgcttgccttttttgttgactttgaagaaaaccaattacttgacggcgatggctgcaattgagagctacctgcattattgctaactactgaacttagatttttagaagaaaagaacaaataaaataaaataaaatcaatatgaatgaccatatttagtaaaacgagaaatatattaccatttgcatcaacctctttttgtttatgctttttcttctgggtaaatacgtcaaatggtcagaactttcactaaataagcataaaaatgttaacactgtaaaaaaaatggaccttaaaaagaaatacttacagctagtagtacgtccaaaccctccattgagggaggtttcacatttgtaaaatcaactgaaataaaagttaagcttccattaggttaaatttataagaagacattcacaatcaaatcaaaatatgtaagcaggcacaacaacaagaatgtgctacaattataagaagttattcaaacaaagtaatagaagacaaacctaaacatacattacttaccatcactagtcagcagatcgggtgttattgagtgcccagattgagccaaagaaactagctacacttcagatgtgtaagattttggaaatttatcagcattgaagttcaaaaaaagcataacatatttttacctgcatagcaatgataaattcagtgaaacctagatatccttgtcgctttgaatctgcaatagcccacaccttattttggtaacagaagcaaacaaagaagcactttagttagcaagaaagaaagaagccaacagagatacttataagcaaggacaacaaattatattaacaacacaagtacacaaccattaaatgcccaaaccatttcagttgttatagataatacaataccaaaggcaacttctacatgagatatattgtaagagttcaaaattagtccattatcagtataaaataaacaatatcaggaaaccataaagtgtcacatcataagtgtaataaaaaaatatttcatttgcaaaaatagttgacaatatttgacaatatgcttcaataacaggataaaattctctataccaacaatgcatcagatttgaatctgaattgcaaaaatcaaaaccaatgtagctactggataatataagaagcattccccaaatcaaaggacaacccgattcaagaccagcaactaagtttgactcggcaaagtgaaattgaagagggatttaagataggaaggatagaggaagttcacagttcactagtgcatgcttgatagcaaaggcagagaagggaacaaataaaaaatgaaagtaaacaacattttgttttatattgtttgaaatgaatgagataataaatgaacattaaaccaaaattggccaatttgtaaaaccatagaatcccagtgttatctctttctacaattgcatgtacacttcaatttcacctcactttatttatttatttatatattttggcagagacaacagacatccttcatgtaaggtagtcctgattgagctagatagaattactatcggcagaaaatttaacatgaatatttaatgcaattgaatagtcaggactcaaatttgagaacactaattaagttggaaacaaccatatgtcaattgattcaggcaatcagtggttcacctcactaacgaggaaaaccaataaaaaggaaaaggtaggccatgttaataatgcccaacttttatcacttttaacttcatcccctaaccaagcaatcatatcttagaattttggcacgtcattccgattacctccaactcctatctgcattcattcagtacaatacaaaagaacgacaataaagaaagaaaatgaaaaaaaaaaaaaaaacgggaaaacagaaaacctgcttaagatcttcgcgggacaaattggacatggcgaaaaacttggtggcatcactccctgtaatgcggccatcgctatctgaaaaacgaagtgcacggtgaaatttttggatatgaacaggaacagaccatataaaattggaacaaaaaaaaaatactggaagatgaagtatgctgtgctgtacctgaatcagcgcaactgaaccactccttatagatcgtctggtgttctttggagcacgaaccgattgggatcgggtcgaactccattggtcgcagaaaatcttcggaatcgcgtgtttgagatctcgtagtgtttgagatgctgcgtttgaacgctttttaccttctcagggaacagaaaacgtgagcgttaaacgacaacgaggacttgcattagcggtgtcgtattggcgatggaaactaacgagacagagttggcgcagaaatgctgctttaacgattcctgtttttgtttaccaaaaaatagtgccaagttagtgaagttgggagtttcatctgaatgcgccaaattacgccttgtcgcgcacttcgcactcactcacctttgcttgctgattcagattgtcatgttaacttcacgttaatatggaaattcgtgtcaccactctattcttcgttttattttttttattttaatccatattgttaatattttttatattaatttgactattttgaggataattcttttaattggtacccatttctatcttctgacttttttttataaatcatcttttatctcataaaaaaacttctaaggtgacaccactctattcttcgttttttttatttaatactctacaaaaaattaaaattatttccttatattttgtatacacgcgcttaacatcatcataaacaaggtaagattatttttatgaaaaaaaaaatatagcgtaagattctattatataaataatagtaagaaattatattgaagttgtttggagaattggatgctaaacgaaccgaatctcccaaggaacctctttagtctttacccttttgtcaacctttgatttttacttaattgacctaggaaaatttcttaattgacctatcttgatttgctgacacatgtccttaacttgttagatatataaataataaaaagagaaaaagaataaaggttgcttgctttggtttggttgatttcattatcgaatattattattgaaaaagaagaaatttgttgatggattactacgggttttgtgactaactagttttggtttgcttgattgaagatcaaggaaggaagcaagatgttgggtgttataaggcacaaggtgctgtctgtgtctgtgtctgtctgtgtctgaagtctgattcctattccaattacatttcatatgatttattttatttgcagagtattcgccctgccttctccgcagtcagacacttctcttctgcatctaaagaggtatgcattattgttctcatctctaatctcttaatctcttactatcaaatatcaaactcgccagtgttgtttcgatgcagattactgtcagggaggctctcaactccgcactcgatgaggaaatgtcagctgatcctaaagtgttcttgatgggtgaagaggttggggaatatcagggtgcatacaaggttggttaattagtttagttgtcttgccaacctcaccttttaagaacttcattaacttaacttccttctttcattttagatatccaaggggctgctccaaaagtatggccctgagagggttcttgatactccaatcactgaggtcgtttttcttacttcatactttatttgcatctcttcacttgatttattaatggtgatggctttgggatgcattcctttgaactgtgttgttcttcatgcttagcagctgcttctaactttccataatagattgcttattgaacgccaaaatttactttttttcagcttctcactttaaaattgataggaaaataagaacaggatttatttatagttggttgcagctgttggattgacttttttttttttgtgaaatataatacaggctgggtttgctgggattggagttggcgctgcttactatggtctaaggcctgttgtggagtttatgacttttaacttctccatgcaggtttggagtttatcttgattgcatcctttctttcttaaattgagtgtgaacttaagtgatatatttttttacaacagcgccacttaatttatgtatatgtacaatgttatgtaaagtttactgtccaagaagatattagatggcattgtatgagtcttatcttctgtgtgataagataccagggttatgagattttcaacacatgatgattcattccacaaggaaaaatgttgacttccctgtgaggctgtgttgataatcacagttatgaatcaaggatatagatgtgtgtggccaaccctagaaatgctttagcatgatagcaactattttgaagattatgtatacaagataaatgagataattaatttacagttgatacataaatggtcaaaaataaaaattactcggtgaaaaacatttagtcattgataatcaaaagttatagtgatatagtctagacatacaatcatcacaaattacaaatgttaggcataattaacaagctaataacaacaaaggatcataaggatataaaaagtacagtgccaaaccttaataagtttgagcctctaaggtgttggaggaataatgccatgtggactatgaagtgctagctacacgacacaaaaggagaaaaagtaaaaaacaactaaacaaaacagagggggtctccaagggctcactgaggtgacaggatgggagttgctatgtagaacaccagcgggttgctggaaaatgacagcaaacaacggaaaatggcgaacctcaaactagagagtggaggggatgtgatggaaaacaatgcatggcagtaaatggcatgctgctgggtcctttggccagaagaaaatgatgaagctcaagctagaggggaggcatggtggatatgacaatgtaaatcagccgggcacatgacgaaattcccaatagtggtagtgatttgacacgttttgggcttgtgatgtctgctctatcaaaatccaatgtgattctctgtgcattgtggggacaacaaacaaaatggtgtgaatttctgtgattaccctgttattaaagatataaaactaaggatttgtggttgggattcagtttattgttaacagagacaaccattcttggcttaaaaaataaagcaattttgtggtgtttaactattagtttgaacatcacattgatgccagacaaatcaatctagtttggtagacgccaggcaggcctttttgctggaattttgttacttgtcaactcctattgcttctatgttcaagtattattcttaagtatgaattatgttggaagatgaaatctctttcttctggatgaagtaagcctttatgtttacaatcttaatattgagctttggtagcttgaatgttgaaatactaataaactgtgaagaatattgtgtgaacatgtgtaatggtgtttattttgggcttcatttgtttgatatacagctgcatcatcttgatttattagctagcagattaattgttcagttttaacctttgttgcaggcaatagatcatattattaactctgccgcaaaatcaaactacatgtctgctgggaaaatatccgtacctattgtctttagaggacccaatggtgctgctgctggggttggtgctcagcattctcaagtacggttctcctagctgttttcttttaaagacaaactttatttaaccatttgagaactgataaataattcaggtttcgtctttgtatgcccaacaactttgcctttatgcagtgttatgcatcttggtatggttcatgccctgggttgaaagtcttgtcaccatattcatctgaagatgctcgtggtttgcttaaagctgctataagggaccctgatcctgttgttttccttgaaaatgaattgttgtaagttgtgctgcttgattctcccgccccaaaaaagacacttgtgctgcttgatctgtacatgaaaatgagtagtcatagattttgacatcagttcttgtttcaaaaaatatttaacttgatgaattatgtcctctagatatggtgagtcattccctgtttcggccgaagttcttgattccagtttttgccttcccataggaaaagcaaaggtagttaattatctgtagtatattaaataccccttatgatttttggagccatatttactacacaataatacattcttattgacttcttgtttgcttcatgcattttaccactaaacagattgagagggaaggaaaagatgtgactattacagtctattcaaaaatggttggctatgctctcaaggtttgtttactgttagatccttttgtattatgaatatgtaacatgtattatgtgctgtttacttgtttgttcaatttgctgcaaagtatgtgaaagatataggtttgtcttgcatttaatttaaatattaaataataagataagacaagaatcgattataactttttttctggatgggttggtgtgttatgtggtgttttataatttgttttaaaaaaaattgaaatctctgacccctttaagtagagaacattcttaaatatatcttctattggtgtttaggctgctgagacactggcaaaggaaggaatcagtgctgaggtaaaactttagtttataatgaacttccccccttttctgcaaaaacatcatttgggttatgataatggtgcgtgatgttcttatccacataggtcattaatttgcgttcaatccggccgcttgatcgatccacaatcaatacttctgtcaggaaaaccaacaggctggtgacagttgaagaagggtttcctcagcatggcgttggcgctgaaatctggtttatctctttacattaatttgtttttgtatgaatgtatcttactggttaactcttggcaatcatacgagtgtgtacttctcttgcacagcacatctgtcattgaggagagttttggttatcttgatgcaccagttgagagaattgccggggctgatgttcccatgccttatgcagcaaatctggaaagaatggctgtcccacaggtaatggttcttaaatattaattagtttctgtgactggaagatttgttttcactattttgatcctgtaatgtatttctattttgaatgggtgaaatgccctgacttgatggttttgtaagagatgagttttgtatcctgataaatagctagatgctaatttgttcaaggttttggtacatgtctatccttcatttaaatttgattgcttcctggtatatgtggatgtacaggttgaagatattgttcgtgctgcaaagagagcatgctacagatccgtgcctttggctgcatctgcttgaatgttctggaaatttttcatgtcctggtcagttctttgcagaaacaaaaaatttccctaatttcctctataaaactgcaggaagaaattgcaaccaaagaatgttggttttaactaatttattatgttattggtttaaaagattctgtcgtatgcataatactgtcctaattttcaggactcacagatgctatacatattttccccatctcagcttatgtgggaggaagttaatgttaaataacttggacaacaatgacacaaggcagcaggaagttttcaatgtttttggtttctgcttggcaataactaaaagtcaactttttgaatacgttatttccagcggaccactatagtgcaagatctaacttgctgttagtttatcttcgtttactgttttagttatattggcaaactagagatattttatttgatgtgaggtctgtattcttgaggttgtgggtatttggttttgtgttaataatgtgttgtgtcctctacttcttggtgtatgtaagactctgtaaacctctaaacttcttttatactaggcgttgtttcagttagaccccacgtaattattgtattggccgatgttaatgtcaattggatcgtagaaagcgcagaaaattagactagaaccttacatttttcccttttacacttaccagatttagtttttcaattatctgaatccattgccagagtttgagtctaattttgatccttgtttaaagttttttttcaccgtgaatcgtgtgttgacaaatcacttagagaggtcttttaaaatactagttgttatagtcttatagacaacttcatttgataatgtgtgggtgtattgtcaggggaagataatttagcaaaatttaaattgaaaacctattttcatattttgatactccgaaacaaaatatatgccactaacattagcaattccaatttgttgtccatagtacatttgagtggtagggttttggaggacaaagatagtggaaattttttcatttctactaaatgttatatgatttgataaatctttaaaaataaaaggaaatgatatatgggtataattttaatgctattatttttttttattcttataaatattgtattaatttctgaactttgaaacaaaaaattatcttttttttttctccacccataacttttctattatctttttgtttgatgttttagaagaagaaaatgttccattttgatcatttaattaatgaagcatgaagtatttttttcactgttatattcttaacatttttatttttaaacggtttattttctacagaaatagctaaaattgtgaaatctcaattgtcccaagcatgctcttaagttttgtttggaaaaagtagttgaaacttaaaaattaattgatagatgaaagttgatagttaaaagttggtaaactaatttattaatagtcaaaagtctaacttctccgtcataatacccctaccgtcttccatcctctctcagactattttttcctctccatttttaattgtaatcaaattaattatgatacaaattaatatcataaattgaattgattattgttaataaaggtaattcatataattaatctggttatgctggtaacttgtatccaattaattcaattttaattaaaataaagatactaattactattaaaaaagataaattatatcacaattaatttgcttgctttaaaaaaggtaattgcatttaaaatcaatttaaaattcataaaaatttcacaattaaaacatatttttgttgtataaaaagaggtataaaaaaagtacaaaaacatgattttattaacaaaatacataatggaaacatgtttctattgcgtattttttacactcccttttacacaatgaaaacatgattcagttgtattattttttgagtgaaaaaatacacaatggaattatgatttcgttgtgttatttgggggtaaaaaaaatgcataatgaaatcatgattttgttgtgttatttagggatgaaaatttatacaacggaatcatgtgttcgttgtacaaatatacaatgaaatcatgttttcattgtgctttgatttttaaccccatataagcaataaaatcacgatttccttgtgtttctatcaaaagaaaattttcaggatattgctaaaaggcacccacataggtagtgctaataataaaaatgtagtgtcaatagtaactctcttaaacaaaagatcataaagaataacacttatttattgctataaagttgaaaagtatcgacatgaagtaacctcgaaagagaaagatgaacgagcaaagtttgattaatgatatttttttcggtttgttttttagaattgccaacaatacccacttttttatccttgttgcttaaaatttattggaatttattaaattctgaaaaaaaaaatagtagtgagagtcactccattacatgaattttaattagataacatgttggtagtattttttagaatttttttttttttaaattgaagcacttgaatctccagagctcaagaagtctctcctctttgcttgttattgctccctcacaacagaaacactatgttcaaataagaacaatatttgttcccagattattgaaataatttcttattattgtttaaggaaattattgaatgagcctagcaaaatttaaaatatataccaaaatattataattcctaaggtcatttattcaatttatttgcattgaaaagattaatttacaaacctaggtaaataaagatgtaaagaagtgctttgagtaattattactatttcttatatatgacaagttggagttgttaattttctaagagttagataatatccttatgtactttttctctcatgtattcatgtcataaattcttttttttttgtttcaatttatgacataagttttctctgtttttccatattaaattaaactatttacaccttttcaattaattattcattaaaagaaaaaaattaatgcggatttttttaattaacataagacacaacgttatatttacatatcatcactaaaatatttcctttacaattattattttatttcaaattaaaagtttaaaatatctgcatcttttatatttaattatttttattaaactaaaataatattgatcaattacactattatttcagatcaaattatatccatttaactttaataactattatattatttttataatttaatataaaatatgatttttattgatccaattattgaattatatctatatattattaaaattgtatgtgtcaaattttattaaaattgatcaacaaaaacatattcttaagtgctttgagtaattttataattatttaaatttaaattttatatatatatataaaataatatttaaattacactattatttttaattttataattatttttattaaactaaaaaataatatttatcaattacactattattttcataaatatatatgaggagatcaaattatatccatttaactttaataactattatatcatttttgtaatttaatataaaatataatttttattgatccaattgttgaattatatctatatattattaaaattgtatgtgtcaaattttatcaaaattaaacaataaaaacatatcatttttaaaaataatataataattataaaaattataccgatataattttatcctctcattcatatatatatacacacacacacatgtatatcactcgtatttaaggacaccttgtgatgtatgaaggagatacttactagttgctaaaaatttgtggtgcataatatttgaatatcaattgggtagtatctcagttccataatatattgttatttttcgtgtctccattgtctattgcatttttattctttttttataagcaactacgatgccttaaaaaataccgaatgagttaagggatataacttatttggttgagtattttataaatctcttatagtgtcttcgacgatattttgaatgttgattgttttcatagctgtttttttttttttttttgttctgaggtggactttgattcacattcagtgtttgttatgtggaagcatgtcacgggcttcaaaatcctttgtggggcaagttaatcggcccacttagtttttcttttttctttttctttaagtaaagagcatataatgcgaatggaggccatgatgtgctgcggaccctgccagcggcaactcccctaatttgaaggtaagacaatactagagcaaacgaggcacatacatagttgagaaaaatgccccccaaccaagacgtggtccaaaccctaaacacttcctattaacaaattttgatacctaccctacctttgagttgcctctaatcacaattcttggtctttcagaacatgattcccatcaccaaatctattctttatttccttcttttgatttgggaaaatattagtgcatctaagcctagtcatgttatttacttatttaaaaagaaaatcgtagtcatccgagataatttcatatacaaatattaattaatgagcaattgagcatacaatcacacaacattaaacaaacggataaaaaaaaacatagcattaaacaagagaaatttgacagatatagcacaagttacttttctttttatggcttgagcgttacagaatgattttcaacccaaatttaaggagaattttttgtatgatttgggatcatcataggtcaattttcacacaaccaagattctcaattaaaaataataataaaacttgattatatgttttttttgtgagtcataagcttgattatatgtctcacataacattgggatgagaatagtccaaaatgatgtaataaattctcaattttaatggctggaggtgaaacaagttaataattaaagggagaagaacaatttgttgggaacttattactaagatctcaccaattgatgtttctctacaagaagttgtgtggcgttactcaatcccatagagagagatatgacgtatgagtatgattactagacaaggaaataataagtggtaaggtgaggggcacctaggtggccatgcaggaatggttggttaggctgcaacattacattaggcctccattgaattctcaagggtcactttacacggtgagtgcgtgtttaagctggcgttgacttttcacaaatctctaacattgcaccttattttatgctatgcttgatgcttcttcaaaacaaaaacaagacacaacctaccatccccgcggcttctagaagtgtcacgttcatttcattaagtggggtaggaatatgcaaagaaacccctattttctctcttgccaaacaccccttcctacaacacatcacaacacaaggtggcctaatgcttcatcattcaaacttctaacaccgtattccactatccttttgataccaaggaagaacgaaaatattatatatttttcaactaaaaaaaaaaaaaacatcatagtacctatgttttcttagccctattattttactcgtaacgttagattgggctctaaaacttaaccatatgcagggctagacaaaaacagaaacagaaacattaacggtgacatttagattgcattgattcttttcttacacaacctaaattactacgttacaagataccacaaaagaagaagaaaaaaagaaacgatttttctccagtccaaatccaatcattcacacctagatctaaataacccacgctgccaaacagcttgagtgccatcggaggcaaaatgatagtagtagttcttttcctgttgcaattgctcccaaaataagaaaaggtaaaaacaaataatcactccactcaccaaacaaagtttctttgaaagcgctcttgcttacacttggtcataaaggtaaggaagaaaataaaaataatcaaaactacaataaaaagccttttggtaccggaaaagctgcatttgctttgcctcatcatgtaacaatttacatgaaatcaatcaaattcaatttggcgttacattcaaacattggaaattcagctaatgaaggcaaaaagaaccaaaccaaaaaataacgaattgattttccaagtgtagaggaaaaatagtaaagagaaataactaaatctaagtgttagagcaacactgaatttcttaactatgataaattgatgcatagaaacaaagagaagaggatcggagattacatacatacccacattggattacccacaaattcatcttgcttttcaaacaaccagatcataattactttctctttttttcttcccattcaatatttcctttcaaataaaatgatttaaaaaataaatagtaaaaagaagaaaataatatacccaacacggaatctgcctctcacagaattaagatcatattaccataatcttacatctgatcatcattttttaatatattttttttccgcatagcaataacaaaaaaatcaagttgaagagataaaaaaaaaatgagaaattaaaaatcatcatcgcacgataatcatcagagacaaagcgcggtgcagcgtagatcatcacccgcggcggcagcatcatcatcaaacggcagcgcgttgagatcgaacggcaagggaggtcgaaacgacgaggaaacgatgttgtcgtcaccgtcgtcaacgacggaggaggaagagtcgcagtcactgtggcagtcttcggggacaagagggggagtgcgcgggtatctccgcgtagtggtcaaaaacggcgacgtagtggttgtggtgggagggcggggcccactgaaggactcaacggtgctactcatgccacttgaagttggtctctgagggttgttaaggttgtcgttgtcgttgttgttttggtggtggtggtggtggtggaaaccagcgtagaagaaaggatcggtggtggggtgttgatagcaaaaaggtgagagagggaaattggttttggccttggaacctcggagagtccgagcggcggcgtcgtaggcacgtgcagcatcctcggcagaatcgaaggttcccaaccaaaccctggctttcttcaacgggtctctgatctccgccgcgaatctcccccacggtctcttcctcacgccccggtatcgaggctcctttaaaacggatccgttcacctcagccaccaccaacgccgccgccgaggctcctcctcctctgcccttccgcatctcttcggagaaataatgaaaccaaaaaaaaaaaaaaaaaaaaaagacagacaccgaggttcgtccgacacgacaaggtgtggtcttggattggattggagctcagagagacatgtgtgtatgtatgtgtgagtgtgatatatattaatgggtttttttcacaagtgggtgttatggagatggaagaggtataataagatgatggggatgagaaatggagagagaaaggattgaaggcggtaccaccttctcttcttcttcttctgctccttcaactacacacactcaaatatattcttaataaataatacaaaaaatgggtcttcagcgtgttcgcgtttttcttctctcaatggctttcctgcctctgtctgtctctaatctaatgccatttttttattataaaaaaataacttttttattttaatttctttatggaaaaatatttgtcaacatctcaaatgctagttaacacggaagagaacgaaaaaaataaaaaatataatatgatgagagaaaaataaaaaatattgataaattgttcaaaattaggaggtgttcaaaaatagactctttctttgttgcctttctggctgccttccttctctaactgacctcttgtcttgctttatttatcccttgctttatctgctgttatattattttataaaaagaatctctgttttttatgtatttttctcgtttacaaattacgaagagtgagttaagggattctcgaaatgacgagaaggcccttgggtttcttggaagtaaatttgccttgccttggttggtgtacttttgatttggtgaggtccctttcatgatagcatacctctgattatttcttcttcttttttctttttttttttttttttcttttttctgggtgcacacacagagggaggggtaaacataaatgcaacagatgaagatcttatctctgttttaaattttaataaataaatatactaatttcctttctatgaagcaatggatttcgatcgatttcctataaagaaattagtttatacagtattttcttttcatctatttcaattatttcggctgtggacgaggaagcgaattatgtgccatgcgtaattgcaattttttatagccgcttaaatgtttgtttttatttttgtttttcataagaactttattaattactaattagcagtgtgaactaactatattttatctgtacgtatttttaacactgtatatacacgatcttaatttttacgaattatgattctacattattattattattattattattattattattattattattatatgataaaggggaaaaaagtccaagcaaaaacaaacagtgagtttaaatagatattaatagcctccatcttagtttcaaaaacatgaacttcaattttaagacttctcaattaagcgatacaaatcttttagtttaggatattttaaaaattataaaaatgcttacgttaatccataattgtcaatgcggttaagtagctcacttactctttttttgtacaagaagtatctcacttacttaaaaatacatattccacataattaatacttaatgtcgtagtttcattttttgctaaaaatcagaagaataaacaatgtcaatttattgtcctcggccaaatacttatcttttttccttgtatctttcgatatgacttttatttattaataattagtggtgtgaattattcaacgaaaaaaagtggtgtgaactaactttcttttagaataatcaaagatgtaattactcaagtgaactatgcatttttcaataagcacacgcaaagtaaaaaatacacaaatgatctcatctgtatgtttatatgttaaaacctaataactaaatacattttccttccactaaatcactagattttgattttggagagattttaggccaattctaataatgatccataaattttattttctaaaaggaaattagtttatttttttctttttgttcattttaattatttaggctgagaggccataagttggatgtgctgtgcacaagtgccattcacatttagccaaatattaatcctttctgtttgtaattttttataggaactttgataattactaatttgtagttagaactaactttttattgatataagcgatggtgcaattacttatgtgaattgtacttattttcagacgcaaagtcggaaacacatggatgttcctatctgtaagttaaatcctaatgaataaataccatttccttcatctaaaagaaatagattttaattttcgagatattttactccaatttctaataattatccataaactttcttctttttatttgcaatttttattagaaaaattattaattactattttttttaaaatgattggtgttgtaacaacatatgtgaagtatatctattttcggtgggcacatgcaaaatggtaatacacaaattaatgatcttatatgtatcataataaataaatataatcttcttcctctaaagcaattgattttgattttgaagaaattttatgccaaattctattaataatctgtaaatattaaattagattttgggtttaattttaaaaatcaatttaattcgataaaaattaaggttatatgcatataaataatttcagttagaaaattgccatgtctttcttatatttctacaaatatgagttttaagttacaatttacatgatttatattttctacaatgttgttctttaaataatatcctattatttcgatatatttatgattttttccacgtattttcttgaaaaatcgattccctaattttcaagaatcaagtactttcttgccgttttacataacatgaaccaaacaaccccttaaaaccaaagaaaataaaagagctaggggggaggacacacaagatatacaaccactgcatcataattcatatgattgagggtaaatacgaatatagtatcataatgagcacattataaagaaaaagcgaattggtatattagtgattattacgatagtgaatatactttaatagtttttttttttaccaatactttaatatttggcaattgtttaaaaacattgacatcgcaaaagaaattttgatatcaacaatactactttaatatcaacatcatatctaatttaagttaattaaaatcgatattagataaatctaataataaataaaagaagattaaaaaaagtggaaaaaaagaagataaagaaaaaaataactaaaaaatatcatataaaatataaaaataataactgatataaagttacatcaaatttataattttttttcttttttattctaaaatacaggccactaatctatatcttgttaattgattggacatgatagtatagtttttaaataataaaatgaaaataaatagtcttgttagatgagacatgtgttgaatttgtatgtatggaaaattaaatcgtactcaaagtcgttttgaaaaataatgtgaattcattttatatgcatctatactcagaagaaaatatcactgaaattctcgacaaaataatgtttcaaatatcatcaactacattttctccccctgtcgaggcttacgtatgaaagaaaaggagttttttttttttttttttttttttctgggtaagaaattcaccagactggattttactgaacaattggtacgtttagcatttcttccccttcttcagctttctttttaaagtaaacagtaactaaagcatctaccatttcagatagacggtgcaattgtccaaggcacgataaaaaaagatacaactattcagaagcacagtaacatgcctgctagtttaaaatgctttaatttaatttcgaactatttttcatcacatgcatcagtacgtagggtaaaggaaatttaaatatattttttaaaaaatttaattagtaaaaagaaatataaataaataaagagacattaaaagacattaaaaaatggattacaataagatagtagtgaagaaaaaaataaattacgaagttataacctcaaacgctatatgaaatactactaaaacaatatagaccattcaaataaactcttttaccaaacatactaatttaacaaactgtttttttaataaaataaactagaaagttatttaatctcctcaaatattgagctagtttaaatttattttttctaaaataagtatgttttcaaataaaataaatagttttgtattttctgatgtgtttgtctaaaatatttttatttaaataaatattttttagaaatacaacatatttgtttcttaaaaaatacttataaaaaaaatatttaaaattactttttaaagtttaaacaaactatcatactattttactccttcttctacataatatatatatatatatataaattgatcaataaactattttagatttatattcctttgatattttcgattggacgacgactttcacagttttactaattattgaatttcgaccagtttcctaaaattactagtcaggtatccgttacacatcatccaacccttgacccttaagtaagacatagtctacgatacgaaaccaaaacatgtctcgtacagtgcgtgagtaattttggccattggatcgattttaattttcttcaaacgattattattttctatttttattatttatctttctttgattagcttccctttctaccatttttcttttctctctctcttctctctccgcattcccgtctccacgttccaaccccattctcgtcgccctatgtcaccatcgaccatgacgacaccaacacgtttgagctcttctacgacgacggcaatggcaccggctcacaatgatgcaagatatcgtgaagatgatgcaagatatccatagagattttcttctcttgctcacgatgggaggtgcacggtgcacctggatttttctgggagggcaaacgcggtggctaggagagggaggggaggcgacaaaggaagatgaagggatggaagtggaactgggtcggagagtgaagggaggaagaaggacaaattggtatatgactgaaaaaaaaagtaaagaaaaaagtaaaataaaataaaaaataacacgatccaacagatgtaattactctcgcacgatatgagacatgttttggtctcgtactgtagactccaacattaagttttctccaacattaagtaaacttaaccacttacacaagtcatttcacaaaatctcgatacacacaatagtaaaatcatgataaaatagaccctcttaaaattatcaagtcgataattacaacataatcctgtatgtatttctacatttgacatagaagattaaacttttcacactttaatactctttaactatatctcattacatttttacatttgacatagaagattaaactttcacactttaatacatttgaagaatatattgattgattaagatccatggtcaactagtgatatatcaaaataatctatgatttctctttctctctctaactgtttatcaaaatatattttacagtaataaaatgaaatacacgttacatcatatgttcagtaaatatatgatgttataataagagttgttctattctatacctttaaaaaaaaaacaaaatgaatatattttataaagttccatttcataccatcttattttaaacgtaatgtcatttaaatatattttagaaattgaaaatttcaaaataaatacacttgtgatccaacatttattactgaatgaatttcacgtggttctattcatagagtaaaattcaatagataattaaatatagtatcaacatatttcccgcactgtttttgaattttgttacatattactgcacaagatggaaaaggtgataagattaacgattgtaaattgcaagatgtgaggacagagagaagtagaaaaaggaaaaggaaaggaaaggaaaggggtaggaactaggaagcaaagacaaagagagttagatagataggttaaagagttgtggggactcctctggaaatttgggttgcaattggccaaggcaacgcatgttttttttttttttcctctcttaatttttattttcttgcgaaacgcgcacgccagttgcagcagctcgctcgggaaacgcattcattcatcgaatcatggccaagtcaagtccaatcctttgctctctttcacaggcttttgtcttttccatatggtttaattattcatttcatttttaaattatttttaatgatttaatttaatctttaattttgtaaaaaattgaaaattaaattaattaatttttaaaaatttaaagattaaattaaatatttaaaatttaaaattaattaaattatttaaaataatttagacactaaattaataataaactctttcttttatttgttgttttggttttggtggactcgtgcgcgcgcgggaaaatgatagacccgcgcattttgttggttacgcaacaacaacaacaacaacattttcatttcgtgcttatccagaatacaatacattggctttgggtgggtgtggtcggttacgcttttattattgtttctttcaacgcaccaacacctactaataataatatcatatgctcacaccaccccaacttcttcatccaatcatctctcaccttcgacttgcttatttaaatctaactaattagattaccctaaactttcaattagtttaataaagttccagaattagctttattaaatactactaacagatgcaaaaactcattattcacggaaacggaattaaaccttttttattttttattttttggaaggcaaagagtccaaacccaaactaaaaactacacacaaataacacgggggagtctggtctcccaaaatatcagaaactaaaagctgcctaatttgaacatggggatgcacagcacatgtcataatagactaaaccctgccctaatgaatgtgtctcccgtttttaaagtaaaaagtatttttttttttaattctggtaataaacattgacgttgttgacaagtttttatttagtttttttttttttataaaaaaaatatttaatctctcatttaaccccttttcgtttatattgtctgttaaatatttatgtgactctgaaaaataaaaataagagataagataaaaggtcataatattttttagaaactaaaacaaatatcaatacttgtccggaaaaatagtgaaagactaataaataggattatatgaaaaaatttaaaattcgaaaactaataatgattttttataaataaagatagaatataaaaatggcaatatgttataatttgaaagatgtaatttagcataaaataagtatctttatgttgtaccattcgtaagttccttagcaaaaaagaaaaatgaatggacactgggctacaaaatgtacctcttcggtcttctgcgtttgcgtgagtgcaatttttcattgattattcggtatgatttgggaaatacccacgttaaatagataatatgcgccttattaataaaaaaatatagaatgtctgttgatttaagagttcgattccccatatttgtgtgaatgtaaaaatattcattgaaaaaatgtagtatttcaaaagatggtttaaatatgcctttaatttctgctatatattgtttctttgtttgatcattgtagtattattattgatttttttggtagaaaataaaataatatttgttatttttaattagttcttttggaataaaatgataaggactaaaagcaaattaatcacatattacaataacaagcaccaaaataaagaagagaaatcttacattgattatttttaaaaaaaaattataaggacaaaaaaaacaatcaatgtattatagaaataaaaaatatatttaagtctccaaagaataattttaactctgaccggaaaatatacatagtctataaaaagttcatatactgctattacttgttttttttccttctttggtgtatacatatgatgaaattttattaagaataaaacttggattattttgtgtatggtagaaaatatatatgaagacactaaagttaaatatttatgttaattcgttgcattgaaaaagaagtttatagaattaatttttaataatcttaagtattttcaatcttttggtctaaattttatgttctaataaaattaactattcatgtttatttttttatattttttattttatctaaattttaaaatacacacttaatttataataatatatttcccaatttcttgaacacatttagttggcaaccatttattttaacagaaattataagatataatattactaaaaaaataaaatgttttttaatattatgtgaaactgggcctgggcccgttaacagttttggttgaatataacatggcgactaaagaaagtccagcatcacatgaaacgaacaaaaattggcacaaataagatttgggccgatttctctaaaatgttgacgggtagctccttcctaatcggctcattagaatgacaataaaactgcttgagataaaaatttgacaaaacaagaaggaaatacaatgtaatagacttgacataagcagaagaaagcaacaatatcaacaataacccttaaccaagtcactgttgtcctaaacaaatttaagatagaaacacaaagtcattgagtacgttttgcaacattaccaccctttggtctcaaggctattgtgtgtggaccctcttaaattataggtcgaacacttacccaacttcacatttaaaaaacaaataagcaaacctttttcgccctctaggcttgggactaaagagttgtgaaggcttatagattgagtacttactccgtcggtaattataatgggttgagttcatgaggaatagtgaccaaagtactattgttcccaaaaaaattaaccagaatgccacgcgaataatattaatacccaaagtaccacgcatcctaattcgcaatgcgtcccagcaaattccgtcagttgatgtggtgtcaatctagtggccacgtatttcgctacaggtgccagcgaaatacgtagtcaaactgtgaatgaacgtggtatagcgaaatactattactatatattatatttattaactatgatatataattaattttaatactattactatatattatatttattaaataaaatatttttattgaatttaataaatataatgctcacacacatatattttgaccgtacaaatttctaaatgaatctataattaaaattttatgataaatattctttaacaatgttaagttaaatagatgaaattctgaaaccaaaaaaagttaaatagattaaattatgtatttcaacataaggaaaaggcactataatattcctatatctcaagagttatattacgatattaaatttttataataacattgtcatttttaattaaatatgtctatcatgtatcctataacttaataatcctaaaataacactaaatatcttctaacctaatgttttaaatctcaaagactcaaacctaaatattatttaacaactaaaactatataaataatatattacaaaaataaaaatacataacactaaattacaaaaaataaaaaacagaaaaatactaaaaaaagaacttacctttcacgctggggagagtgagggaaagtagagagggttatatagtggggaggaggagaggtttatatagtgggccacataggtgtaattcgcttgggcacgaattcgtccatgtctatcacgtgttaccaatgacttttttttattgtttgtgtcacgtattttgctgggccaaatgaattatgtagtgctgttatgtgtcctacctgtttatgctcggccaataaattgacgttacattagctgacgaaattcgcttagatgtattctgaattagaatgcgtgacattacgagaattaatactttttgcgcgacattttgattaatattttgggaacagtggcactctgttcacagttcatgaccactagacaccaatagtggaacataaacaacttgagaaagggtaaaaaaatttgtcgattaacccttagtaaatacaatgtatttcgttgaatgattgacattacatctgactctctcaccagaattcctgcataacacgcctatggtttgcagtggccggaaaactaaataaattatttcactgaaataagtcaaattaaatattcactaatttattatagattatagtgtcctttgatagtttttcttttcgaaattgacatcaccactcatggtcgagtcagagtggctgatgaaagctttcgtcctttgatagtattttctccccccttttttttatagagaaatcgacggcatcacacgcatggtggccggtggccggtgggtatgcaccaagtggggtttttcttcttcttcgtctctctctctctctctctctctctctctctctttatatatatatatatatatatatatatttaatatcattataattaacatatgctctttcaaagccaacgtatcaatttgtttctatatagtcattattttttgtttatgctaacaatttagggagcttattagttattagcctccgttttacgtacggtgtagtctaataaaagtttgtagggtagcactcgtttaaataaataaaaactatgatagacattccaaagaagcttgcattgcttgctataataacttgcacatcaagaagttataattgctttaaaagagtagaagaaatggatccttcaaagaaacgtaaagtagaaacacaagttaaaaaaaaatgtaaactatatttttcttcattgaaaaaatagagataattacaaataaatgagtaaaagaaatcaataaccccccaaagtaatcatcataatgatttattacaaacagtaacgctaacgcaaatttctccatgcctaaacacgtgctaccaatggaaaagctcataaaaactccggcgaaatccagttaaatccaaatcaaggcttcaccaaaaacactccatctccgtcatttcagtgtcctgtgggaaattcgcaattaccatactctgcaacacaaattcaaaaacacggtttcaacacaaattaaacaaaaaaaaaaaaaaattaaaatctaaactcatgcataatgcttttaatgcaatgacatggacaaaataaccgttctatgtcgaccatatagggccgagcaatcaatattcaataataaaccctcaatttcaaccttatcaagtatcaactgatagggccatagggcgaaataaacaaataaaacataacatttcttgcccgtagttggtacttattattaatgcatgtttatttaatttattttgatcaggggaaaataggcattttgtgtctcacggcgttttcaagttttttttttttaaaaagatagataataaaagttaggagatagtttgtaaagaagattataaagtaaaataataacacacagatataattatagggataaaaatgagtataaaaataaaaatataactaagtgattatagcagcagtacttactgggaggctgagtgacgacataagcagtgccatcaaaataacacgtgccggatgcacgtgcctttttctgatagtaactgttgaaagcgtaggaagcatgtgcctccaaggtgttaggatcgtaacacgtggcaccaggctgaatgggagtgcaatcagccccaccctctccgcaagcgtaattaagagcgttctgcagcttgttctccgaagaaccgccattcgccacgcaccacgtctggcccttagacgacgtcgtcacgtcaccgttcaccggaacctggctctttccaaccccggacggcggcgcctccgccgtaagtggaatatcataaaccttgttctcacttggataaaacaacccgtagttcctctccgacgtgggacccgttttctggttctcattgaaaagcgcgaagaggaaaacgtcgagtgactcattgggcttcaagggggtcccactcccactcaacacgcgcttaaccaagtttccgttatacgacgccgcattgtccgggctggctccgatttcattagagtccccagcagaaggccaacccgtttccgaaacggcaatcttaacgtcgtcgtatttgagtgctgacaaggcagcaaaaacggcgtcgatttgagcgtcgaacaagttggtgtattttaaaccattacccgaatcaaccacgccagggttttccttcaacagcgcgtagtctaaagagattttatcagagtttgcagcgtaagcgaagaacggataggcattcaccattaggtaagaaccggtttggcggagcaagtcgagcatgggtttgataaccggttcgagaagttcggttttgaaggaaccggatgaggcggggaacgagttttggagcgcggagagtgcgatgggtgaggagattttaatgtttttgtcgaggttgtatttgactagagaagcgtgaacgttcttcatggcgggtacgaggaactttgtcgtgttgtttgggtccacgaacacttcgtttcccacggctatggcttcgatttgcgtggcggggtagtagctggagatgttggcttggacccacgcgtcggtgaaggactgttccgcggcggctttggcgagaagctcatttggcatggcaacaacaaccttcattcctgagttggcaaacgcggttaagacggtggcgtcggtgtcgtagagcttcacacggttcagcccctgagtcttcagaagctccaccactttcgccggtgtaggtaggtcgttcgcaattcttccatagtttattccgattgatcccgcttctgcaaagcccgtcagaaagttaacaactttcaaatgcaaaatgaaatgaagcaacaaaatatacatgcagtttcataagtgctattttctaattacaaccagagttcatcttggtaagacgaaattctaatacaaactgaaagaagagtagtgagagatgtatttacctgatgatgaagaaaagaatgagataaggatgaagaagaaggagaatgtgagaggagccatgctctgtttgagagagaagcagagcatgcagataattagagaggaattaagaaaaagaaagggtgcagttattttgtttgtgagaagagagggtgtggaattttatagagtgattggggacttagtgggccaacgtggttgaaggaaaagagctttcactttacaccgtgtgggacccttgacctgtgttggagacccaaccaccaatgcactatctcagagccgctaatgttaggttagaaaaaatgttactacttgcggaagacaaatgttttttttttttcctgtatagaaaaaaaaagagttagaaaatgttagctgaactgtccgttggatcatgtagtaggctatgttattgaccgtacacgtgcagcgtatcgtttgggacaacgttgtcgacagggacacgtctcgaatggaacggggtgaggtcgcgattgccaagggacatgtttggttctatagccgagaaaatataatattattggcttgattttcgattgaaacaatgatgaatttacggaaacagggccaaggtttcaatgattttgctcaaatttgaacgttggactttgccatccagccgtgcttgatttgatgacatgtgcattctctctgtttttgtttcttctgggtaaaaagaaataaattgggtgggaatcaattaattcaggactatatatataataattcatcaattctctcggcaaatgaataatactataataggcatcatcatcatgacagagtaatactattattttatgattttatcatttgctatgggattttactttacttcagggttacattcatttcttgctgtagatttagagatctccaaatcaaagtttgttgaatgatttttaaacgaagaaatcggtttttataaattttttattggagtaaatttatgtaatatgattttaaaaaaataagatctgtatttttataagaaatcatttcttaacaataaaaatactaatatttatctaatacatatcagggattattccaaaactactttgttagttgtaacttattttaaaatatgtaattgttatttaaaattaaaataaattgtcgtaatagtttatataattaaggataaaaatatctaaaaaaatgagattatttattttataatgcttatagataatgagtttaagtagttattataaaagttttaaagaaatcacaccgtgaatatgcattcaaattaaattaaattaatatttaattataatcaaggggaaaaacatgcatgtttagttttaggttagaaaattaactgtagttctaaaattgattttagataaattttcatatatttaattttttataaaaaaattgaaattaaatttaagttctaaattgattatgagttgaaataattttgaataatttttgttttagataaaaattataatatattttatttttaatttgattttatagtaaaagtattcaaatataaataaaatttaaaaaataatttccaaaataaatttgataaaatgatttgtattcaaaattagttttaatctgtcaccgtgtatccaaataggtacgtaattccttaattaaacaaatggtgtagatcagatcaaatgaagttaaatctaaaaccaatgaaaactacaagatttgtagaacatttgaagaggacaaactagagtctgtttgaatataagattaaaagtattttttgaaatttttctactgaaaaattactatattttaaaaaaaaattctcaaaagtaattatggtatgtatctaaatatgcccgtaatgatgaagacttgacaaaggagaaatgcagcaggatcgatcaataatcattctcctcgtttggcaacgggaaatgttggtaattgatctgtgtgtttccttctgatttcattcatcccaccacggaatggtatagccattaattaattcgaaatgatagggattttatcttagtcaaaatctcaaaaggccgtgaaagacactactacaccatcgtgtggaaattccatctttttccccacgagtttcatagaaattttacttgaggaggataataactaattccttgagctaagcaataaaaaggatttctatacattttcttattagttattattattaatgtgatttctatcttatatatttggtggatagttaaagaattaaaagtacagaaaaaaaatcataatgtcaacaacaaataaattattccataattttttttattgtttaacttgttaatctatgtactacatatatagccagtacagagatattagagtaagatttttcttatgtcgaatacattatcagagttttttagacaaatgacatgccaaaattcaatctatgtactacatatatagccagtacagagatattagagtaaaaaaaaattatatatataccattaattttgtttatttcatgtgttgtcaaattaattaaattgtataataaaatatattaaatgataggataaagttttttagacaaatgacatgccaaaattcaatttttgtcctttgattatgatatgtatttcaggattactaacatttaatttagtgaccctatgaaaaagaaaatgagtaaattttcaagtgaatgcacctttaaatagctagtgaccgataaattaaccctaaaataacgactttttttttgtgcagcctgaaataatgacttttgggtagggtgtaattggtatcggcttaatttggccccaataaataaatttacatattttagtattaaaataatatcatttgatggttaaattattgtactgatcatttaaaagtcagatgattatttttaaaaataagaatctttaaaaaactaaacagagattgatgctatcgtcattgatcaaatcctcatccaaacgtatcctaaaatagcaacatatacaaccaaaaactcaagttgctccgttatttttacttagtttgtcctaaatgtcatattttcaaagggttttcatttaacattattttagtctacataatcaaaactgccaaatgattgtcacaccctatatccctataaacaaaaagaacaacactaggaaataataattaatgttaaaatattttatatttatccatttttatcatcttaattaattataactaaatttatttcatttgtcatactaccgtatggacaaggtttgagaaacaaatgagaaaagataaaatgacgtgccattagcaagaagaagaaaaaaaaacagaagaagaatgacgtgcgattaatactttttatacagaaaaaattattgtgccgtagattagtcggtgaaatgccccatttttccatgctaacacaaacagccaactagctttgcaattatgaatgatgcaatcaaatacgtatgggggaccttttgctaattgaaaatgcttgcggacgaaggtagtagtaattaatactttggtgccaattaataaaacatcaattttagtacttgttttctgcagccattttatccttcaataatattattaaccataaagaaaattaacaataatggcagccattgaatttatttatcgttgaattaaccaaaggaagtggtcggagttggagggcattttctttctttcttttggttcaactctcaacgccacacatagggcgttggcatgcacaaaaatgaagatcaatttgaaggtcccatttcaggtcgtcacagtcatgtcattattcaaattaagtaaaagggacttgttacagaaaaaaattgttagatgaaagatatatttttatttggcacatgtattgaattaatttaattaatgatcagcttataaattttaaaagatatatattatcgaatggtagttatcaacaaatcattagctgtatattttgcacactaaatgaaccttttattttaatcaagtcaaaattggtttgtcaacttgcatctttccaatttcacacaggtatcgtttactttaaaaatcttaataataaatagggagctaagacgtttctacacttaaactctcaggtgtactaaaatatgataggcgatttggattcgtaccctcattaggtcggtaagactcattcatatatatttcataattcatagttcatagtgttcaatttcttaataactagtgttacattagatataattgcatctggtacacttggttgtccaagctaccagtctaccacgatatgtgatggagaataacattaacaagaagtaatacaaataaaataattagtagtttatgtttgtcatcttaagtttttttttttccttctaaaaattcattttcaacaaaagtagaaataaagaataaattaatagatcattcatgctaagcttagacgatctgtaaattcttcaattaaaactggagattttaggtgaattcatccctaaaactatacataagcttatatgggcaatttttaatgtctttatgatggaggttcactctacggttttctggttggttcacttggacaccaattttagcttgctagggtttgattggggcactgtggtggggatgaagatttttttttttttttttggagggagaggcttttgtccaaccatttgaggagggagcattttattgttcgataaggacaaggagatctcaattgatggattgggtggaagtgggacatgcatatatcataatgtagacgttatgtttcatatttatccttgtttctagccaccccaacagaaaaaattggatttatcttttccatggcttcaggcataaaactgtatttgtaaacctaagtaactcgttcaccaagaacataaacgatagaactcatctttagctgtgaaatatttggttagaaaaaacagatatataacttttcaaactaaaaccaaaagttagtttagaaagaattaacttcagggaacaaattatggcaatatattgaactagaggattaaacataaacctatcaatatatttaaaacaatctcatactctgctataaaatcttaatctttattattttcattctttgatccccctccctacctcctcccccctccccccccccccccccccccggcaaaaaaaaaataaaaatcccgaaccttttacttatcttcccttaaaataatatatacagtgtaaattttgggtcatccaaattcctggcattgaattcaatcttcattgtgctggagtgagaaatagatgtaaatcttaatgggaaagcattcaaacgcataggattttgtatttatgattttttatacccgaattagaccaagaagccataatcatgtaaatcataatgtggaagccgtgaaacagagaatcgtgaaagtcatgattgtccatatcctgattaaataaaatcataagcgtcaagaacgtctttgagtataattgatgaattggtttttcttccatctcactctttttgacacacatagtacggaagatttttaagagcacaagtggaaaaacttaacgtgtgttttaagggagagaaccaataatacgttcctcaagtattagaaccaatggatgaagtcaatttaatctttaaaaaaaattcgatacaatttaatttaaattttaaatagtgaacaaatacctcaatcttatcagtttaggtcactgaaggaaacttacaaagccataactttccaataaaggattgtgttacttgtgaaaggccagacttatttcaagtttctcttttaattcctgtatctttcgggtgcagctcttttcattttttttggtccacggatgattttttgtttttggtcattatcagtgtctctcttagttcatgttatgaaatcgatttcattagggctattacatcttgcagtcccactattatatcatatacctcgtgttgcattctgaaaaagaatgtaaatgaccattttgaaatagtcttttcagaacataatagaaggtacaagatataatagtgaaagttagagtataagaaataaatgccgataatgacccaataaataaaactgttattcgggtaggcctctagaattatgattgggagttgatattcagaccctttttctgctcttcgcaccagctcctttttttgtattttttattattactaggagaaaacaggcaaactgtttttccattttctttgaataaaaagaaagataataaaagttagtgagtgatttgtgaatatgattatagagataaaacaataatttattattgtagttattaaaatgggtatacaaatttatatactaaagtaccctatttcctttatatatagttatagattatagatatattaaggaatattattcttgtttaaaagatattatttgtttcttatgtaagaacaaagtattttaccctttaaatattgcgttgtgatctcaggtttgccaatcttgtcccacttacccctttgcacttattagtgtttctaagattcttaagcagatgattagatcaatgtttttaaatgttgttcatccagggtgccctatgataatttcgtccagaactgccctttcaaacgtcaactccaatttacagaataagggcaaataaattttcgaatgttactccttggtttctcacggttcagtacaggtgaaagaaagttttccacatcagtcaaaaggatactcacattagcttatttatcataagcaaaagcgttaaaattgaataatttcagtttcaccacatacacaacacacgtacaacagaggcagtttcaaacccaataaagagcaatgcacttgctggctctttgtcaaaaggagtgcataagagaatgcacaggtgacatgtatagcattcagagtttgcttcctgcaccctcttgcattaccaagcaaaaatatgaaggtgcaagaagtttcactcttagatccaaatggaaagtggatagcgggcttagctttggacttatggtccatcaggaagacgggcatgtcccaataacacgattattaatgtaagttggtcttccataaaaaggctcctactatttacacccacgttttctaacaaataggataaaaataagactaacaaatatgagtataatataaatatttatcatttatttatttatttattgtaaatcagcttaattcttaagtgatattttattaaaaaatatatacttattctggaagtatatctttataactatgaatcattgttagggaaatacatttacggaatgtgtatatgtaattttggaaagacatttttggaaaataaaaggggtatacttctttttataatgagtaattgagaggtaggaagggggtgtctggggtgtaaatagcaagagcctaaaaaaattgtgagttgagtttagcatcctaacgtataatgtagaagattcacaaatatattttatccaaataatttgtcctattcacatttgacgaattgaagttattattatttttatctcataaagacattaaatggttgaatagcttttgaagcagcacggatccaaaaaaaaatcagctgtagaaataatattcacatatataattaactaggaacgattttcatattatagttttttttcactacatttcaaattatgaaagcattttgtaactatacatacattgagaaaaaaatctggtggtgcagttgggcctaaattgaatccgtccctgtttttaggttataatatattacataccattcaatcaagttgagtataattattgcctagacttagcaagcttacccaaaactatattaaaatggttgaatagcaagtgagtataaaataggcattagggtaaaatttaacgatatatcattagcacaatatcatgtatattaaaaaggattactgtgggaaaaaaaatcctattttgaatgactaggcaataatgtaaatatttatgattcaaaaataaattttaaagaaataagaaatattcacatctaaattacttttttctttctttctgaattcacacctaaaatacttaaacacgacaatagtactattttcccttcttttcttttcttttcatttccggctaattaaactagtttttttttttaatagagagattcctctagttacatatgagattatatatacaatgtattttctctatttcaaattgattaacgtttacattttttcccacataatttaggaaaatacgtaaccatttgtgtaaggcaacatattaacaaaatttgttaaatatttaattgaagatcgataaaaagaggcttttcctatttacccccgactaaaagtaaccaccctaaacaacaccagacttagtagctaaaactatcacttgcacttaaccccaaattacctaaataagagtaatatccaaacttaactaataggataccctattacatctggtcacgtgatcttacacgtggaatccaacaaacccaactgtctttctcgctgaatatgcctatataggtgagtttttcttaggcatgaataacttcactcattcattactctcatagacattttgatttgatcgtgagaatctctatgagtaacactaccaaagtcactcatcaccatcatgaattattgtgccattgccctgattcatatccacatcacaacaataataaaattgcacaattataatattagagaatacgatttatattgaaaccttaaaagatcaaaatgcaccattataatacctaagataggaaaagtctaattaagctaaacataaatagaaagtttaaccaaagggaaaaagaattaatcaaccggaccgagggtttggaaaagtgaaatttggtattgtttttgtaatgaggcattcacatgaataaagttaccttccatgaatttgcttacatacacaggtagttcagttctttcgttattgtaatgtgaggcattcgcatgaataaagttaccaaccatatttttgctcacatacacaaaggcattaaaaaacaagacacatccagagatttttacatacacaaagacattaaaagacaatacacatggcacataccgttatgctagcatccaagtgagaattgattgaattcctgaaaaataccttttcaaacatctcgggctccattctatacattagcaaggctaagaataataagtttccttaccgttccaaattgaaatgtataataaagccgttcaattacacagaaaattcacccctatcatgtttctcacgcgcccagcttgattaaaaaatatattttctttacattctattctattaagctgtttgaatttgtttacaaacaaaacaaacgagagaccaaatgcactagccaagaccctacgaaaacgacaccgtaaatcgtaaccccataacactagacacagcatatataaagagaaacaaagatatagcatatgggggaagagagagagagagagagagagagagagagagagagagagagaaatgaagaaaggcaatgttcaaaagaacaatatacggtgttcgacactatacattgctttactctctctcatcacaatcttcattattcccttttgtgagtccttcaactatggccaagccctgtcccagagcctcctctatttcgagtcacagcgttcaggtcgcttaccctacaatcaaagggtcacttggcgtcaccattctgccctcactgatggcctagaacaaggggtacatacattacttcatattaatatattaaccttaaactatgttattttccttttgtgctagcttttcattcattctaatattatggttattgtttttttgggcacgtaggtggacttggtgggagggtactatgatgcaggggacaatgtgaaatttgggttgccaatggctttcaccataacactcctctcatggggtgctatagaatacggcgaacaaatcgctgctgccggcgagtatgctcacgctctggagactatcaagtggggaaccgattatttcatcaaggcacacacacaaccaaatgttctttgggttcaggtattaatttcaattccagtgaatttttttttttttttttgaaaattgattacccacgcgccgccgttgaaaatgggatgaatgattacttcttccaagctaaccggaggaatagatttaaatgtcggagctgtcaacggattcgtccgcaatctcgccgtgactggcgcgcgttatcactcgcagcttggcatgaacacagaattttgtaaatgagatttgttaaattagagtatctaaaaggaaaattattatgtaaaatccggtcgtctaatttcaattaatcatgggatatgttatgaatttttttaataaattaagaaatgtaactatttatacttattacataaagattattcgacacccaacgtccaattaaaaaacataaagatttgtcggagattataatatcttaaatcatatagtaacaattatttttaatatattaattagaaattgtgttactatataaatgcaaataatgagtaatgatatacatatacttatttattttaaatattttatccaacatttcttaattctttctttatatcaatcaaattataaattctttcatacttataattttttctttttttcaactctacctatctctaggtgtaagataacatgtttatcaaacattgtccgcaaataatatatttttaatactgtacgttatagatttcactagtttaggattcagacttgcaaaaatgacaacaacatatttagcgaaagatacagaaatttcactcaataaaaaagtaaaaaagaagtgtgctacggtaatgaaatgatgaagatgttaaattcctttataaaagtggttatatgtgtatatttggtcttatgagttaaaatgttcaggcgggtgacggcgacactgatcactactgttggcagcggccggaggacatgacgacatcacggcgagcttataaggttgacgccaacaaccctggctcggatgttgccggcgagacggcggcagcattggcagcggcatccattttgtttaggagaacaaacccacattactctcaactacttttgcatcatgcacaacaggtatatgagttagttttattgacaatgttacgtagttatggattaatttaattaggattaatttcaatgggttgttgtgttattgtagttgtttgagtttggtgacaagtacaagggccagtatgatgagagtgttggagtggctaaagggtattatgcttcggttagtggctacatggatgagttgctgtgggcagcagtttggctatatagggccacccaaaaggaggaatatttaacctattttttggagaaggcttatgactttggtgggaccacttgggccatgactgaattcagctgggacgttaagtacgctggtgttcaagccattgcttccatggtaattccctcacacttcccaattcaaagagtcacttcccttctttattgtaaattgtcaaaaaaggtgcattagaagtactatactcactttgaaaagaaaaaaaaaaaaactaaaaagcactatactgccagtattattggaccttagttacatattatggatcatcattgatttctttatacatatagagagaggagtgacactctttctcacacttttttttttatatatttgttttataattagttaaaatttatcaatttttacaagttttatttctcatctaatataaattaggagagaaaaatatcaattaaaaataaatactattaaaattaattatttcaaaaattttaatcaataaatattaaaaaaagaatattaaaaaatgtcattagcatttctctctctctctctctatatatattttcttcagggtctagcattagcatagttggattcaatttacacgagaataaatttttaaaatatctttagtgatagatttcaaattgaaatattatatcactttttgtagttttcttaaaatcacataattttttttttagtattagatctcattttgagatcttaagaaaagagaaataaaaaatttcttcacatattgagggttcttctataagaactcattctttatgttaaatatctcttcaactcctttatcagaatatctagtgaatatcagatattaagttcaaaatctttattcaagatctatcactaaaaataaattttaataaattataaaaaaatgtttaaaagagtacaagaaagaatgtccctgtcattcatgtaccgtaaattgcttaccgacatttttccttttaacagttccttatggaagaaaagaagcacaagaaacacgaagtcatactcaaacagtatcgttcaaaagccgagcactacctatgcgcgtgtctgaacctcaacagcgttaataacgtggagcgcaccccaggagggttactatacatccgccaatggaacaacatgcaatacgtagcaacggcgtcgtttcttctcacggtttattctgatcaactcctagccactgatcagaagctgcattgccaaaaaggggaggtgggtccccatgagatgttggccttggcaaaatcacaggttgattatattttgggctctaatccaatggctatgagttacttggtaggctacggtccaaaattcccgcggagggtgcaccataggggcgcatccattgaatcatatggggaaaataagggttttattgggtgcactcagggttatgataattggtatggacgtgttgaacccaatccaaatgtactcattggggcactcgttggtgggcctgatatcaaagaccaatttaaagatgagagacgaaattacgttcaaacagaggcttgtacctacaatactgcagcactagtaggggtttttgctagattgcatcaatcacatgcacatgctgatgtttattacaatgaaacccctttggtagcttctagctaattggggttatagagaatttttttggtccattattccgggcaaagaatatttcttaacagtgcttacttaatttttgcactgccattgtaattgtagtttgagtatattagtatatagtaagatacaaactatacaatcaatgttgacgcagaaacgcgtctagagacattaggtggaatagcaatttgcaccacttatagttagcctagcaattggaaagagttgcattcgtagttaaattagaaggttctgttcttttgggttagtagttaaagacttggacaatttataccatgtgcttttattttttgtcatattttacgactttatttaaacctaagaattttaatttatcacaaagaaaacaaacaaactaaataattaaaaaacgtgaaaatttagtgagtttcaacgtcaaaaaggacaattgagagaaaagttttaagtttgatagattggcaacctaatagtaatagttgcagctaccgacacaaaaaggcaagtgtcatttgtaatacttggagcatgtaggaagggagatcgaatataacactaaattgacaatactatatgttttaaaaaattcacgagattcttgggtgtttccatttctttcttcataactctgtttgcttgtcttctgattttccattcttcccctttaattacggttgcaacgaacggcatgagctaaaggaccaaaagcacttttccttgtaaccgaatttgcggggaaatggtctcgcatgaggaaaagccacccaaaacgaaaatcaagcaggaattagtgccacgacgttaattcaaatgcaagtatatttattggtcacaatcacaaggttcaaaatgtggaaacccagcagcacaagagaccatgttcccatttattagtactacttcattttctcattcccgattggtcgacgcgctctgttagcgcgtggaagtgtcaacacggttggtacttttcactttaggacatttttaaggaagcgtgtgtttgtgtgaaagtgtcattttccgtgaagcacaattaatactagatttacatcaagaatgtttgaatgtcgtaaaaggaatactagtagtgcagtagcgaaaatgccaccctgcagcaacgacactatctataattgggataatttaatgaacagcagtaattaattctgcaagaaaatcaggaaaccataatggcaattcgtgatcactcagggcactcacgatttaagacagggacttttaaagattccggaaatttcatcaaaaccacgttaactcaagtagcatatgttaagacaaaagaaaagtagcatatgtgaaatataaatcagaaaaattccagcaggaggaaatttatcaaatgttgaaaaaaattgcttggactatactctttgaaactcgttatttaataattttttttttggagtcaagttgaaatcaatataggattttacctattaataataataaaaaaggcataggtagcacttctcgatataaatgcaacaaattaacactactagaaaactaaaagcttgaacgataaaagaggcggggggggggggggggggcgacaaaaaaataatcaatggaatacttggtaattgaaaattttaagatggtgaactttggccatttagttccatctactaatttttgcaagtcgtgcatatttatttatttttctcgaagaaaaccttagaaatcaatatatttttataaggaaatttctatttaagttttttgtttgggggagaagttaaaataaaggcaagaaactcaaccaaacacatgtcttggcccaagcctagtgagtacacgagatgcacaccatggcatcgagttcatttgttttgggcattatgccatggcccaaagcaaaacctgctgtgacctgaatcttcaatatatagtactcgaatctccttattttaggatcttaacaatgcattgattctaccgattttaccatcgtacgacagggcccctgatccacgaaacaaaatgctcattctttagttctatgtcactgaataataacccaatctatattggatttttcattaatacacagcttgttgggtaatcacggaccctcaaatatcaaatgcggaagcggaataaaatcaaatgaggagcgagagagacaatcaaatagttttacgtgggagaaaaccttcttcaacacgaagaggaaaacccacgggaccaattccagatcaaatattcactataacaataatgggttacaatgaatcaaatacaccaatgtggtggtacactcaatctctcaaacaatggtgatcactcaaactccctaaagtgtttcactcaaactctctctagagatctctcaaatatgcacagcacaaggcttgctcaaatactgcggaatctctcacgcagtcaaatatcaaatggcggagtatctcaacgccctctcaaatatgcaaacatgaaggcttgctcaaatgtgctctcaagactgtcacttgaggctctcaattttctgtgtgttttgccttcacccttgctcatctatttatagggtgaaatggactgggctttaagccatcaaatcaaataagattatatcttatcaattaaaagatatctattatatcttatcaaataaatattttctcaaataaatatcttatcaaataaagataagattatcaatcaactaaaaacgaaaattatccaacaaatctcacccttccgtttttcagtgagaccagggttcttcaacttcaacatcaacatcccggccttctttctcggcttcaatgtgccgaattcattagcccggctccttcacagcaatcttcaaatttccatgctggtaccggcttggtcatcatatcggaccaattcaaatcggtgtgcactttgccaagtattctgcaacgtactcagcctcggtcgtccatagtgccacacacttctgcaatcttgattgccaagagactgttcctccaacaaatctcatcaaatatcctatcgtcgattttctcgagtcggaatctccccctaagtcggcatccgagtagccttgcatctcggccaactcataagtctggttttcatgcagggaattcgtcacgtcctgcatttccttcttggggtatctcggttgttcttcttcaaccgttgtagaactcggttcatcaccccggttctcttcatcaactcggacctcaatatcttggtcctcatcagcttcttgctggagatcatcatcttcagtttctccccctgcttcagtctgcacaagagggacgggttcttcacctcggtcacgagggcagccgggttcttcacgtctgacagtaacccgatcttggagcttcgagatatcatgaagagtctcatcttcatgaaagatcacatctcgacttctcactatcttcttcttgataggatcccacagtctgaacccaaactcggttttcggcgaaccaaggtagatgcattccttcgtcttctcatcgagctttgccctttcatctttagggatattcactaaagctcggcatccaaacacctttaggtgatcataggtcgttttctgtaacgtcccgtatgcatccggttcattaacattgatttatggtcattaagcgcagcaattatcacagataattaaatttggaagcgataaacttaaatgacatcatcaagcgtcatgaacaaccactgtacatcatatatggtgaattcttataatatacaacgtatatttcaaaactatacaaaatccctatcaggatacaaaataacaggcatgtatcaaaagatagagccaacatgctcttaaacactatgcctaaggttctcacagaacctatccctgctcgggcctcttgccctgggatctctcagcagctccctgagaatcacctgcaaaacataacccccaacaggggtgagataacaatctcagtaaactcagggtccttggaggtctttcctccccctggttcagttccatggcatataatatcaaaattggcattttaaactagtaatcacagctatcaagcaatattaccacacatacatagcatatttacaattatgtatcaaggcctgaggaggcattatccactatgtgggcacatctcacttggaggctcatccactatgtgggcacatctcacctggaggctcatccacgatgtggacacatctcacaacaggactttcatatatatattctatcaaatataattctactggccagagaatctcatcaatcacatatacaacactatcacagtgttcaactcatcatatgcatatgttcataaaacaataatcacacaatttcaatatacatgcatcatgatatacaataaccatcactccctcggagtatggtggaacacaacagtgggaaacactcccaagaacaaagagcttacctgctctcagcgctataccggctcttccggtttcgtggtcacaaccaccagcaagattactatcacgccctacacaagacataaaacaatcaatcaataacggtccttagccgttagaatgaaaggaaatgccattcccttccattaaaacctctctgttctctatcttaggattatcagagctaaccaccttataggtgattcacagaccctcaacaggatctatcttggtccaaccaagatcttagagtccccttagactctgcataagctcaattcaatgatctactaggtcatatatcaacaatttttcaacttggctaaaacagctatatcaacacattttcaccgtttatttatccttctgaacaacttttgtaaaggcacttaggctcataactatcataatatcttccttttactcaacatttttcctacccatacctatctcagggtcaaaaccaaacttcatcaaaaatcatgtttcaaagtttaatattcatcagaacaacctcctgagcatacttttctaaagaactcaagcctaattctagccctatcacaaaagggtcactattcaccccaagaacaaattctcaaatcaatcggtaaaacttgtgtttcttacctctaaatcgacagaaaaggctagagaacagcttttccaagcttgaacgtccttgaaccgccttcttttctcctcagaatcaaactttgtgaatttccctagagaactggatctctttgtttgatggttttcagagaaaagtgatgatggaatctagctcattgagtagttcctttcaactttcatgttgggtgtgaaaggttttggtcaacggttgagtgtttaagaagcttctctagttcatcaatggcagaagcagagaaaaggaagaaaggaaagagagagaagggctaagggaaagagagagaaagagagaggctgttatattcaccccacctttttaagaattttgtccgcaaaattcaaaaacatacctgtcaaacaactcggggtatagctgtaccagctcctgctctcgctcccaagtcgcctcctcaggtgtcctcccttcccattgtaccttaactatgggaatggtcttactccgaatctgcttctccatcctatccagaatccgtataggctgtgtaggacaagttagattctctcgaatctggacggtgtcaggctccaccacgtgcgacggatctggcacatacctcctcagctgtgacacgtggaaaacgtcatgtagccctgacaactggggaggcaaagctagcctgtaggccactgatcctactctctgaagaatctggtaaggaccgatgaacctaggactaagcttcctcacacccaaagcgcgtccaacaccagtaactggagacaacctcagaaacacatggtcgccctcatcaaactgcagcggcctgtgtttatgatcataataacttttctgtctactctgagccttcaacaacttatctctgattaaacggatctgctcagtagtctcctgaaccatctcaggtccaagaagctgtctctcacccacctcagtccaacatacaggagtcctgcacctccggccatacaatgcctcataaggtgccatacctaaactagcatgaaaactattattatacgagaactccaccataggtaggtatcgatcccatctagtaccttgctccaaggcacaagctctcaacatatcctccaaagtctggatggtgctctctgtctgaccatctgtctgaggatggtaagctgtactaagcctcagctgagtcccgaaagccttctgaagcgtactccaaaatctagaagtgaacttcggatctctgtcactgataatactctctgggacaccatgcagtctgacaatctctctgacatatagctgagccaacctctctgcagtatagtcagtccgaacaggtaagaaatgagcagacttggtcagcctatcaacaattacccagatggagtcacatccactctgagttctcggtagtccaactacaaaatccatggaaatgctatcccatttccactctggaatctgcaacggctgcagtaggcctgacggtctctgatgctcaatcttcactttctgacataccatacatgtagacacatactcagctatgtctctcttcatccatggccaccaaaatctccacctcagatcctgatacatcttggtggcacctggatgaatgctaaactggcccttatgagcctcagacagaactgcatccaccaactcgcccttaggcacaacgatccgatcttggtacaacaccaagtcatgagtctcccaggaaacatcctgttgaccaatcatggccctcacatcatcatcctgtttctgggcttcccggatcctctgaattaactcgttatcaatcttggtctctctcaactcaagaccactagcaccctctgttacagtcaggtgcatatctctaaactgctcaatcaacttacagtctgagattatcatgcaggcaacactcacatgcttcctgcttaaggcatcagcaactacattcgccttgcctggatgatatttcaactcaaattcataatctttaaggaactccatccaccgtctttgcctcatattcaactccttctgatcaaacagatacttgaggctcttgtggtcactgaataccactaacttggcaccatacaagtaatgcctccaaacctttagagcaaagacaatagctgcaagctctaaatcatgtgtgggataattctcctcatgtggcttcagctgtctggatgcataggcaactaccctcttctcctgcatcaacacacatccaagtccccgcttggaagcatcacaataaacctcaaaacaatcctcaggatcagggagagtcaatactggagctgtggtcaacttttccttcagtctcaggaaacactcctcacattcatgagtccaaacaaatgggctacctttcctggtaaggcgggtcaaaggtaacaccatctgtgagaacccctgaatgaacctccgatagtaacctgctagaccaagaaaactacggacctctgaaacattcttgggcctttcccaagacatcacagcttctatcttactgggatcaactgctaccccagctgcagaaatcacatggcccaagaatttcacctctgaaagccaaaactcacacttagacaacttagcatacagctgattatttctcaatgtctgcagaacaatcctgaggtgatcggcatgctccgcctccgttctggagtaaatcagtatatcatcaataaacaccaccacaaactgatctatgaatggtctgaataccctgttcatatagtccatgaacactgcaggggcattcgtcaaaccaaaggaaatgacctgatactcataatgaccatatctcgatctgaaggcagtcttcggtatatcctcgggcttaatccgaatctggtgatatccggatcgcagatctatcttggagaacacacttgcacccctcaactgatcaagcatatcatcaattcgaggtaaaggatacttattctttatagtaaccttattcagttgcctgtaatctacacataaccgcatacttccatccttcttctttacaaaaagaaccggtgctccccacggtgacacactcggtctaataaaccccttggacaacaagtcctcaatctgtatcttcaactcctttaactctaaaggagacatgcggtaaggagctatggatatgggtcccacacctggaaccaagtcaatggagaattcaatccccctatccggcggaagctgtgtaatctcatctgggaaaacatcaacaaactcactcaccatcggaatctctgacatatccaacccttgtctctcatctgctgtactcagcaaaagatagccctgagctcccctctccatctccttgcgagcttgcaagaccgagagaaaagaaatggcactcgagctgacttcatctgaaggcactacaaccttcttataacaacaatctagcatgatgccatacttggccaaccaatccatacccaaaataatctcaagggtaggcatcgtaaggcaatacagatcaacaacatattccttgccctcaaactgaaaatgcacatctctgcagtacatatctactctacattgctccttagaggcggtgataacctccataggagaagaaagtctgaacataggcaagttcagtcctagagcagtgcgatcactaataaaagagtgagtatctccagagtcaaataagactctcacatcatacacatcaatcaaaatagtacctctgatcaaatcaggaggtctggctgcctctctagcatccactgtgtagactcgtcctgcagtaggtgctactgatatcactggagcagctatagcccgaccgcctgcctgtggacactccctagcataatggccatgcttgccacatttgtaacataccaactgaccagtggaacacactccccaatgatttttcccacaagtagcacacttgggacgtggacctggtctcggtgaccctcctctctggctggagctcttcttgaatctatctgctggagaagaaacccccaaatctctgctcttgcccttcccagtagggcctgatccactgggtctcctcatctcctgtctctcagaggaaataggctggctgccactgcgtctcctaatcatatcctctacctggcggcactgtctcaccaggctgcccaagtctcgagatccactgccagctatcttctcctcaatactctctctaagtcctctctggaacttagcagcaagaacctctgcatcaggtagagccctcctgaaatgtgcatatttagccaactcattaaatttggctaagtactcatccactgacattttcccctgaacaagaccctcaaactcggcctgcttctgctctctggcatctctggggaagtatctgtccagaaattgagcttcaaaaacctgccaggtaataacttcaccctgacctctcaataactctgaagtggtaacccaccactcatgcgcatctccctgaagcatgtatgtagcatagagaagtctttgatgatctgaacattccatcacagtgaagatcttctctaaggcctgcaaccatctgacagcagcaataggatcatattccccatgaaaagctggagggtcatgcttacgaaaagcaatgagcatcttccctctagcagctgtatcctcctcaacatcagcttgggacaaccagtcccctctgtggtgactaggcccatcagaatgatgactacctccaccctgctggcgactaccctcgccctctggagtatgctgtgcagaagatactctatcctctctacgcagagatctcaactctgccatcaactcctcattggcctttgccaaggcctcattcgcctgtctactcgcagccatctcatgctgcatagctgccaaggcggctataactgggtcgggttgtccatctgcacccgtcgtctcactattgttccgggtcctcaccatggcactgcacatgtcacataaaagggtgagttgatcaggctcacactcaataaccacacatgcaatagtcataatgaacacctagaccattagtgaacaacacacaattcaccatacataatgcttccctataaaattgctctgataccataaaatgtaacgccccgtatgcatccggttcattaacattgatttatggtcattaagcgcagcaattatcacagataattaaatttggaagcgataaacttaaatgacatcatcaagcgtcattaacaaccactgtacatcatatatggtgaattcttataatatacaacgtatatttcaaaactatacaaaatccctatcaggatacaaaataacaggcatgtatcaaaagatagagccaacatgctcttaaacactatgcctaaggttctcgcagaacctatccctgctcgggcctcttgccctgggatctctcagcagctccctgagaatcacctgcaaaacataacccccaacaggggtgagataacaatctcagtaaactcagggtccttggaggtctttcctccccctggttcagttccatggcatataatatcaaaattggcattttaaactagtaatcacagctatcaagcaatattaccacacatacatagcatatttacaattatgtatcaaggcctgaggaggcattatccactatgtgggcacatctcacttggaggctcatccactatgtgggcacatctcacctggaggctcatccacgatgtggacacatctcacaacaggactttcatatatatattctatcaaatataattctactggccagagaatctcatcaatcacatatacaacactatcacagtgttcaactcatcatatgcatatgttcataaaacaataatcacacaatttcaatatacatgcatcatgatatacaataaccatcactccctcggagtatggtggaacacaacagtgggaaacactctcaagaacaaagagcttacctgctctcagcgctataccggctctcccgacttcgtggtcacaaccaccagcaagattactatcacgccctacacaagacataaaacaatcaatcaataacggtccttagccgttagaatgaaaggaaatgccattcccttccattaaaacctctctgttctctatcttaggattatcagagctaaccaccttataggtgattcacagaccctcaacaggatctatcttggtccaaccaagatcttagagtccccttagactctgcataagctcaattcaatgatctactaggtcatatatcaacaatttttcaacttggctaaaacagctatatcaacacattttcaccgtttatttattcttctgaacaacttttgtaaaggcacttaggctcataactatcataatgtcttccttttactcaacatttttcctacccatacctatctcagggtcaaaaccaaacttcatcaaaaatcatgtttcaaagtttaatattcatcagaacaacctcctgagcatacttttctaaagaactcaagcctaattctagccctatcacaaaagggtcactattcaccccaagaacaaattctcaaatcaatcggtaaaacttgtgtttcttacctctaaatcgacagaaaaggctagagaacagcttttccaagcttgaacgtccttgaaccgccttcttttctcctcagaatcaaactttgtgaatttccctatagaactggatctctttgtttgatggttttcagagaaaagtgatgatggaatctagctcattgagtagttcttttcaactttcatgttgggtgtgaaaggttttggtcaacggttgagtgtttaagaagcttctctagttcatcaatggcagaagcagagaaaaggaagaaaggaaagagagagaagggctaagggaaagagagagaaagagagaggctgttatattttccgacctgtccagacttcttcaggaatgtcttcttcaagtggtcttgatggtgacaaattaatcaagtcaactgctgttctgacggcttctccccaatatgctttcgacaatcgagcattggatagcatacttcggaccttttcttcaatagttcggttcatcatctcggcaagtccattcaactgcggagtctttggaggcgtattctcaaatcggatcccggcttgtttacaataagcatcaaagggaccgcaatactcaccaccattatcagatcgaaccactttcaacttcttgccagtctccctttccaccatcgcgtggaattctttgaaacattggagtacctggtctttggtcttcatcaaataaacccacactttgcgggaatgatcatcaacgaaagaaacaaaatacagagctccaccgagtgatctctcagtcatggagcatacatctgtatggacgaggtcaagaatcctcttgcgtagtctgggctgatccagtctcacaaacgaaacccggtgctgtcttccagctaggcagtgcgagcaactctccagcacttggccattcaacccggttaatagtactttcttactcaacatttggagtcctttctcactcatgtggccaagacgcttgtgccacaactccagggaatatccatctctgacagaattggtttctccaccaattgtctttccttgcatcacatacaaggaaccatctttctttccacgagccataaccaaatttcccttggtcagcttccatatactttctccgaagtagtttaccaacccggcatcatcaagcttgcctaccgagatcaaattcaaacgcatgtcaggtacatgcctcacatctttcaaaagaagtcggcacccgacatttgtggtcaggattacatcaccgacaccaacaatcttgctggtcacctgatttcccatcttcacgacaccataatctcccttcctgtaagcggagaagaatccctcatgtggggtgacgtggaacgaggcaccggagtcaacaatccaagtgcaatcatcatgggctatgttcaacattttctcactgaggaggaatatctcggtattcgggttagtagccacagctgtagtgctcgtatcattcttcttctggggaacaatctgatctggcttcacacagccattttgttcatcactttgcaaggtccagcagtccgacctcttgtgtcctaccttcccacagtagaagcacttcaaatcatgttttggcctagtccggcctctggacgtatctcgtccacctcgactcttgccacgaccccgggagtcggtctttcctcgattctcagcaacgttagcctcaaacgtgctggatacacctcgttctcttctcctggcttcttcattcaggaggctgtctgtcacggcatccatcgtcagttttccttctggaatcgagttgctcaaagtcaccaccaaagtatcccagctttccggtagcgaactcagcaacagcaaagcctgcatctcgtcatcaatcttcatgttggctttggacagttgattcaaaatacctttgtaggtgttgaggtgctcaatcatactcatgccgtccttgtattctagcttcacaagccgacgaaccaggtgtgctttgttcctgggagtcttcttctgaatcatggattctaacttgttccacaattcgtacgcgttcgtgaactcggacacgtgctcaaagaggcttttgtcaatatatttcctgatcgtggccacgaccttccgactcaggatctcccactccttgtccgacttcccggtcggcttcacttcaaggataatgggatcatataaatccttgcagataagatgatcctccatcatcgacctccaatagttgaagttatctgcagtcaacttgaacatatctccgtcgtgagttatgccactggtctccatctcgtctccttcagaaccctcgaacctgggctctgataccactgttgggtaatcacggaccctcaaatatcaaatgcggaagcggaataaaatcaaatgaggagcgagagagacaatcaaatagttttacgtgggagaaaaccttcttcaacacgaagaggaaaacccacgggaccaattccagatcaaatattcactataacaataatgggttacaatgaatcaaatacaccaatgtggtggtacactcaatctctcaaacaatggtgatcactcaaactccctaaagtgtttcactcaaactctctctagagatctctcaaatatgcacagcacaaggcttgctcaaatactgcggaatctctcacgcagtcaaatatcaaatggcggagtatctcaacgccctctcaaatatgcaagcatgaaggcttgctcaaatgtgctctcaagactgtcacttgaggctctcaattttctgtgtgttttgccttcacccttgctcatctatttatagggtgaaatggactgggctttaagccatcaaatcaaataagattatatcttatcaattaaaagatatctattatatcttatcaaataaatatcttctcaaataaatatcttatcaaataaagataagattatcaatcaactaaaaacggaaattatccaacacagccattatgttgagcagatagttaagtttgtggctatgtgttggcgatttcagggtacagattcttcaccagtttgctgacatgactaaagactatagtacacggaaatgttcaatgaattcttcttactctttacagatgagtagaatcaaccgcatcattcttgtttactcatgttatggcatcttattcatgccaaaacatgtaatgctaccacttatatttgttaaattgcataagctctaatttttttctaaattacataggattttcttttctcctaattaactctcattgcaggtagatttggtgtttctcgatggtctttcttcttgttagttacttcatcctttgtcaaaagacatgcaccttaaagttattgtgtataattaatcacaaaataaaattttccattttgtttctttagtacctaccaaactctcttgtgagcttgtggccccatatattgtcttgtacacaacacaaggagtcaagttataattttatttcattatatttccacacctaacaaactcgtggtctcttttgtctcacattctacaaaggataggaataaagctaagtatgtaactcttcagtaaaagtgtaaacccttctttctttctctcacagtttaagtgcatctttcaatatcaggcgaaaaaatgtttgaggtaaaaatatttttgcaaagaaatcacgactcttgtttttacttttattcattggattatattgcaatacgctacagtaatttcaactaaaaataaaacatacagtaattgttttaacccacttggcatgtatgaatctctgtgcaggtgttttgttccattctaaatggatattttttcattatctctttgaatttgagtagacaggactgacttttggtccactactttaattttcgtggtgccataagcagaatcaaggggaactgtcatggcaggaggtcgccaaagctcagaatatctgttcatccaatacttgaaagattttattatcattattgttctattttcttacgaacagaaatgtccagttagaatgctggtaaatactatatagaattaagctttctctcaagatgtttatggaagagaaacacctttaaagaaataatcactatgcacgaagcgatactggtgagatgtgtgcagtgttaatggaaagaaaagagaaaagtgatatgtgcgtacttttttctctagaagcatcccttatttatactgaacttacctctaagttagtttaagattctttccgataatcatgccgagatctctaacagcttgacctcacgatcttcctaataatcacggccgacatctttaactatttaaccttacaatctttactgttattatccacaatatccacgatctcatctatagttgtaatcaaagatatcatctaacaattattaattactaatatttagcttttaacaatttatttggatgtaagagtaaaataaggagaaaataaataaaaaatgcaaataagatagctgtataaggtttaaattgataaaaatatagctgataaaataatatcagaattaatagatttattaggataaaatcatattagattaaacggtaatcttataattttttatatatttgatattattgtattatgtggagatcgaatttagattatcttttatatatttaatatttattatcaattaaagtacacaaattaaatatgataagtatatacttatttcagtataagatagaattaacgtatctacactccaggtattatcttattaatagccaatagacaaatgtatcaatattaaaattagtattaacacgaatttaaatttgatacactgtttttttattataaaaaaatgcgaatacctagatatacatctaagtgccaaaataatgcacattgccagacaagtactaaagtaggtcgagttgtctctcattccaataaatttcaaagtggacgataactcccaaccacgaaaattaaaggagttgggacaaaaacatagtctcaatggactataaggacacatctcacctcaccaatagcaccgtaaagggaaaaaaaagtgtttaaatgaccacaaatttcacttctttttgacaccaaatgaaaagctaaccacattagacaaggaattgctgattctgctatgctgtgattacacaacacattagacataccaagtcaatgatgctgtaaagaataaactcccaagactctactgaacatcctatcttttttttgcaattgttcctggtgtcttaaaataggaagaaaaaaaaaaaacgtttactactttgaaggtgcgaatttatttaatacttttttaaactaattaaaaatatataatatgaaatattaatattttaattaatacattgaagatacttgttaatagtttttttcttttttaacatacctatttaaaaattaatactccttgttttcccctattatttaaggttttaatacacaaataataattatatttgtgcactcactttttattctccatccttttttatcacatttttcttcttcttattttttgtttcccttcactcatatacatcaaaatagagaataaatttattagaacccatacacaaatttaaaataaataatcttatcatatatactaaaattatctgtcaatttttttagtatatcttttactctctttttttcacttttacatttcatatacaattatttttgtctctcttttaataaggtatacttaaaaaaattgtaattaatattagagaaggtacagttttaaaaaggtgacatgtaaagttatctttaatcatattttttaattttaaaaaggtacagttttaaaattttaaaaaataataatcaaggactaattttaaaaaaataaatataattaatgagaaggtgacatgtaatttaattgattaaaaaaattaatagtatcaaaacacctcaaattattggggacaccgtatacactcccttaatattatctttaaatttttatgggacataaagaaaaatattttttgaagtgtgaaataaaataaaaatagagatggtaaatttttttagtagaaacaactaaccaaccaattaactacattggttttcaaaatttcaacatactcaatcaaccagccaatctgctaaaataaaggcggagtttaatcccccaagcccaggatttcaaatagattttttggaaattgaaaatagtgaggaagagataataacttcaacatcttactcagactaactgaattagatttcttagcttcacagaatttcaaatagtagttacaagtacatgaggcaagaatgattaataattaataatatgcggccttaaattgtttggttttttctgctgctgcagaaacgcttacaagttacaagggagctctaggaaaataacacaataatcttattaatctaggtgcatactatatattatatagagatatagaatagaaatctcatagttcattcagacttcagagagtggtttctaagttctaatcaaccctcctttggcaaacaactatttgtagctgttcttgacagattgaaccttagtagcctcttgtgcaccatcatatgacttgtcaacattctgattagtcaccccttccttggtttccttggccttttcctctgcaactctttggaactcttcagctgtggaaggtgccctctcttccatcaaacggttactacggtttccattgctcgcttgcccataattctgatactttcaataacaaaaaaataatacattactttctggtcactgtaacatgttgtcaacacataatagaatcattctttgagtgcatgtgtggattttattagagagttcaaatatgcttttacacttaaattaacaaattctacctttttcattttatatattgaaattcacaaatataaattggaattcacaaaaatacttttccaactttaatctaattaagcttagtttgtctaggttttaatccatttctcaagtctagatttccaccttcaagaactggattatgcaaaaaaatgaaaaccttccattaaatacatgaattctaccttctcaaacacatcaaaaagttaattaaaacttgtttccaaccaaaggcaaaatcaaactaaaaatgattaaaattccacgttttgttagtctaatttaattttctagtgggtgcattcgtacaaaaaataaaaaagtttccacagcaagtagataatgtaaattagtaactctagagcagagaagcaaattgaagtagaataacttggaacacgagtgaaagaaaaagaaaagaacagaacagagatttaaaaaggaaatgaaaataaaagggataccttaatggtgctgttgaagaatggcttactactgctaggctttaccatggaggatcttgaagtggcatggagaagagagtggaactgaccacctaccatggttcttccctctctctatcttcaggaaatgtttggctgtttgatagagactagttactagttagtataatttgggctctcatgtctgtttaaataaaaaccaaaaacaataaggacaagattactcctggcctcaaactcaatccagatatccatgtattgccctttgttaatgacgtaatgctaatccaatgaatctgtctagtctatcccacttattaatgacttataccaaaagaaaaatctccatcaatgactaaactgcattacacttatcacaaaattaattaaattataatttcaatttaatgattaacattaatatttaatttcaacctttattacttaagtatattgaaataaaagaaatactaacaacatatttttgaatatactcttttaaacatattctttatagttgactgaaatttattgataattacaaattttttaagtttcatttgttatttaatgactctttttctcttgattttgtaatttttaatatattctaattaaccaatgataaagtgtatgtgttagatttaaaacgaatgatttgctaacatttttcaataaataaaattgaaaatttactgactagattaaaaaatgtagttactaaagattttctataaaaaatatttatttttctctctaattatggataattattattattttttataagtattattagaaataaggataccatgaattttatttatcaaaatggaattttttttggtaagtttttccatgttgaattgaggttgaacaatcatttttaatttatcaacaaagcgtccgttcaagaaatgatcacatattttagttatatatgttgttttaatttcatcattagataatcaaattcaattttctaatatatcaagagaaataaattctttgtctataacttttttcctatttaaaaattcattgctaaatttgtaacatattaattgaatagtgtaaaataagatctcacatctaatatgtagtaagtgtaagctttcaaactcatctttttgttaagtaaaaacaagcacctttataagaatatttttatagtttatattgacaaaattactttcataattcaaaatacatgttcaattttttccccatcaatatatctgaataatattttttttaacaaaactaatttatttattttaatcaaaatttaatttaaaagttaaaattaatgtatatgtagtcagaattataatctttaacttattcttactttcctcattttaagaggctttcttcactttttcgttgggagatgtacttcacaatctttctttgtaattattgaaaaaaaatacagtaacttttcttatttatgtaacgaattgattttaaaaaatgaatttaatgaatagtggagcatttagtagaaagtaagttttaaatgaaaaattattgttaggtattatgagaaaggtagtactaacatgtttcaactgtgtcattaatgagtaattgattttgtgcattcattcactagttataatacattcatttattatttttaaggattttatttatttttaaaataaaccaaaataaaataaatgaatatatttttttatatgttattgatgtgaaatattcatcaattttattgatgactaattttcgaaaaatatgtttaactacttttgttgtgatcttttcttttatctacattttttcattcacaatatctcaaaactttacttacttattttgagtttaatatcactcaacccaacaatatattagtggaaaattaaagatattaatctataataaatatttatttattataggttgtgtttacaaaataattactaaaactaactttgtaaatgtttcataaaattattattgtgtaattattattaatataatgtatatcgacattttataagtattgaataataataaaacaataaaataaaataattttttataagttatttttttttttggatttaaagataaatgtcggaagtgggatttgaacccacaccctctaacaaacttgagttgggcatcctgactttgataataaaaggttaaaactaattaaggagttatacttttttaactaatatatatatatatatatatatttacataattaaaattagttaatttaaataattaaatatttataggaacataaaaattttaagaattatttttgtaacttccataaatgatatctaattacaaatttttaaaaaatatttacaaaaaatattaattataatttaactaattataataatttatgttcaatataaaaactatgggaatatagaaataatatgtgtgtatatatatataatggaattttttatattcaaagactaattataaaagtaaaaaaaatgttaatatcaaaacaaaaaatccaatcaattcacgcctttattaatccttttagagcatacaaaaatgattttttataacaccctaacataataattaagtttattttttgaatgaaatgttaattaagtaaaaactactgtactttttaataaccatatcaatacgacattagtaattaatactagttttttccaatatcaattcgaagcacagtattattggactagaaagtaggtaaccctgcttttgcgcaggaacatcgtcaacactcaacataggatagatagtttgttcgttgcgttgccatgtcggcgtcggagattcttcgggaactggatttgctgaaggacgaaaagaccaaaattgagcacaaaatctctgcgcttgaagctcaactcaaagagattaatctccaaaacgacgccgcaccaccctatgcttcttcttcttcattgtaccccaccaatggattgacccaggacatgattcacagatacagtcgccaccttgtgctcccttcctttggtgttcaaggtcttcttctcttcaacattttctatattcatttaattatcattcatgctacataaacctaattaagtttaaattaagaatgaaggaagattcatattcgttgcacgtgtgtgtttgagtattaactgtagttagttccatgttgcaactgctttatagtaacaaccttaacaattgcaattttgccatgtattgttttcactgcgaaaatagacattatagacaaatagcccttatctgcatgtttatcttgtttttttttttttttttttgtcttaaattttcccaccttcttgtgtttgtggagtgcagggcaggcaaatctattgaagtcgtcaatcttagttgtgggagctggaggtttgggtgctcctgcattgttatactttgcagcttctggtgttggtaatatatgacacttctaagctttgtttggataaatttttcataaacacttataagtgaaggaaataagaaagaaaaatgaagtcaccttcttgcacaagttaaaatcatcttatacacttaagcttttggagaagataagtgccaagttgattttaacttatgggggaaacttaatttattttactttcttattttcttcttgtcccaaacataacctctgtctatatgcttcttgaaacttacattttaaaaactatactcagggcgcttgggtgttattgaccatgacgtagttgagctgaataatatgcataggcaggtattgtattatctgttttaccttcccgccctcttttggcatagctggtgcaacacgtacattgtgaattgttgtgtttgtgtctggcatcagcctttgggcgtttgcacttttgcgagtacaaggtgttaatatgtgtcttgcttcagtgtttgtgttcgtttactatttttttaattaacttcactatttttattaatttggacaagttggtgctttatttcaggttatccacacggaagcatatgttggtaagccgaaagtgaaatctgctgctgctgcttgtcgctcgtaggttactttttcaccaaccattcatcacatcaatttttgttgacaaactgcaaataaaatcccatgagaaattttctttttcaaatgtttgttattgtaatatttgtatcatcattgttcttggaactaagatattttgaatattaggatcaactccactattcaagttgtggaacatgaagaagctttgcggacttccaacgctttggaaattctcagcaagtataatttctataataagattgatttttctttttgcttgaggcctctttcttctatacttacattttacatttcattttttatattaccactgactattttttttttttttgtaattatgtgaatttggtagatatgatataatagtagatgcaacagataatgctcctacccgatacttgatcagtgattgctgtgtggttctaggaaaggtaaatctgaatgttttgatgtatgaacagattgtgaccatttgaattgatgtcacatgggccttttcacttgttgctttaattttttggttcctccatgaatacactttctaagtcagcattatttttaatgttttggttcatcaatgcaaaagatatctacattaattcaacaaaaaggaagttatgcatgctcctatgtgcatgataccgataaaatatttcagtgtgtatgtgccatatgagttgttatctccaaaatctttgtgcaattgctcccagtagacatcaattttttataaatttgaaaagttacaattatatgaatttcttatatttcattccgttaaacaatttcgtttttggttcttattttttatacttatgtacatagtatgatttatgggaaaacttaagttacttttgcaattttttatattaactgttttcctgtgatgcagcctcttgtatcaggtgctgcactgggattggaagggcaggtatatgtctaattttttttcccctagcatttaagttgaataatgcttcatagtgcgacaagtactcctgtgtgcttgattatatcacaatttgaggattaaatattgaaacttttactgcagcttactgtctacaattacaatggtggtccttgctatcgatgcctcttttcaactccaccacctagaacagcatgccaaagttgtgctgagggtggagttctaggagtaggtaaaattactactgtctttgtgaactgtatcacttttacttctcattgctagtctgcgagacattttcattagcatgaacaatgtgaaccataagacaaattcttctgctctcctgttttcattgtgaagttcagtcatggacttttagtaatgtgtactataactattagtgacaacaaaaaatgattctgattgtttgattccttttgccaaaactgtctctacaaacggggaagtatctatgttttaagcaatcaagttttactgaaaaggaggtttttgcaaacaataagaaattcttattgtttaccggagagtgtactctttagtaagacttattggctaaaaattcaatttgtttggaatgttttaagttgtttcataattcgtttagctaaactgtgattattatcatccgtgtcagttattatgaatatttattgttcaacttgcattacttctcactagtacctttgtattttttgttctgctattgctatttttctgcttttctgacatttgctctgatcattttcagttcctggtataattggctgtctccaagctcttgaggctattaaaattgcagcttctgttggtgagccactctcaggaaggatgcttctcttggatgcattgtctggacggattcgtattgtatgttaagaactccaatgtctattaggattttacaagtggggcatcaaataattgtttgaatgtttaggatttcttataaattaggattttatttcgataaattacctggatgcaaagttagggttttgtatcctagtggtattggaactattagggtaaaggttttcctacttaaggatactctttagaggaattgattgacattactattgagtgattctcatattcacaccaatttttctgtcactaataataactgtcatgcagaccaatcattttctttataattctaataacaaattgcttttcaaactggctatcccaaattaaacttagacttgtaatatatacagttccaaatcatatttgtaattatgatgtctcaaagtaaaaaaattatattatggtttttgaggatgataccatagcaagatcttatttatcagttactgattatactttttttattacacaggtcaaaattagaggaaggtctatgcagtgtgaagcttgtggagaaaatgcaacatttacccaacagcaattccgagaatttgattatgagaagttcactcagactcccttgcgtgtggtatgatttcttttttttcttgcctttcacctcctttgtatttagatgaaattgtttgaaggtttagttgggtatatttttcatttgcactttgtattggatgagattgctggagataaaattcctcccaaaagactacaaaattgtctcccagtatatattattttgagattttccatgtcattaatgcattccattccatttatatgcagcctcctttgaagttaaatctacttcccagtgaatcaagaatcagcagcaaggagtacagtgaagtaattattaagaaggaaccacatgtgctggttgatgttagaccaactcaccatttcaagattgtatctctaccaaagtctatgaacattccactctcaacattagaggctaggctgcctgaagtatcatcagctttgaagaaagaggaagaggaaagtggtgcagtttctggatcaagtgcacaattgtatgtagtatgcagaaggggaaatgattctcaaagggctgttcagtatcttcacaaaatgggtttcacttctgccaaggatattgttggtggcttagagtcttgggcccacaacgtggaccctaggttccctacatattagctgacacgtatagctatgctaaatattactttcattaagttatactgcttgcttgaaattatttctccctatattttattagtgacgttgctttcatttttccatgtctatttataacattcacgtgacttttttttatagtcttaattgattttattcttgcttttgaattgttatagaaaaattgtagcctattcatttttacttttttcttcgcattgggtagagtttaaaaaaccacaggttattcacgttgttgctacagttgccaataatagttactttccattcctttcatcaaatgatgtttgctgagacaataatatcacatggaaaatactaaatgttacgaaaatttcattgtacgaatccacacaaatatacgtggctacaaattataatacctatatcggagttaaattaactgattcgtgaatttcatgtttttgtttttcgtacggtatagcactgctctcaaagtattaaatatccatcaatttagttcctattttattaacattcaaagactaattttaaagatattcgatttgtaatttcatgaaattattacgataataacaactcgcgccttaacatggatttccataaagcctgaccacgcacaaacacatagtcatatagaacaaaataccttgcatcacgtatcccaatccctactttgatattaacatatgcttaaggcaaccaagtcaaaaagcagcataagaatcataagtaaaacaaacaattctgcaggatttggtcgttctcataaaaggatcatttaaacgaagaagactactttgttagtttgcagaaatggaagcagagttcaaacacttagtctgaaggaagttaagccttgcagagacatgattgtgcatttgccttctagagtttcaacttttactcattttatatcagtagaattagatggtgtaagcaaagttgaatccagaatttgatgatatgcagattattccgtgggacacagaagcatggtcctgtttcttgttatggataacaaattaccaaggttatggatgttataaacttccacgttataataatttagattgtttatattataacttagtgactgtagcttgcactgaggtggaaaaaaacttgcatttcaaggaaattttactcatgtaaaaagaaaattttatttctccctctcactgtatttgtgacgcctaactacgcttggaaacacagtagatacatgggaaaccacgtccatttactaaaagacgcagaagcaatacctaccagctctgatctaactgtgaaattacgtcaacatgataccaaacatgctaaaaggcaaggaaaggagacaaagaaaacaactgaatttttttgacattagatcatcccattcactttgaaaagtgaatgcatccttaccaaccaagaagcaatatctttaagagagccatcctaatatatagaccattctttgcctgcctaaagtaagcagctcttggatctctatcaacttccactgtgatctgcatgaaattaagggaccaatttagtttatttaatcttaatgcttgcattcgtatcgggataacatatatcacatgacatggcaatatgtgcttacctcgtcaagtcttggaagagggtgcataaccacagcatgtttttgcatcacatttagaacatcttgatttacaatatacttgcctcttgcctcctcataaagttcaattttttctccaaatctttctttctgaatgcgagtttgataaaccacatcgcacttagaagcaacttccatcaaatcagcactttcttcccactccactccctttgatgtcagatagtcttttatgtcatcctatgaaaaaaaataaaaaattccataactcattttgtcatgtaattcccaacatcttatccttctcatgaaaccataattagtatttgcaacagttaccttcattttaaccacgtttggagagacaaaataaattttcacatcctgatacttggctagtaagtatgcaagtgagcgaactgttctcccattagcaaggtctcccacaagcccaactctaattccgtccagttttcctatctctctttcaatggtataaacatctagcagtgcctgagcagtttgaaaaagaaagagttttgaaacacaaaaataatatcatccaattaccacccaaactattataaatatagcaaaataaacaaacaataaataaaaagtcacaaaaattcccctttgtctgtattttctacaagaaaaacactaaagaagaatcaaacatggaatcatcttgtcaagtgtaaataaactagtaaaatatataaggtatgtacctaaagaataaagtataatcaaagaaaccttcagattgaaaagtccataatatattgttataattggctaggaaactggtgtgtactcaaaggaagctaccatttcaatccttgatagcaagcacctcactagaaaaatggaactccatttagatttatacttcaattggtttttggcacatttttggttaattgaaaataaatttcttttccccaagaaagagaaagatacaatttcttgagtcgaagtcttgaaggtatgtcccataaaagaattaattttatattcataggtcattgtaaaccccttctacccaatcaacttctcctaagaaattataaggagaaattgtggccctttcagtttcaaataccatgagacagcatcagcataataagggggtttgtttttaaaatttgattgggagtaatgagtcatggaaacaaatttgttaagtggattttccctgtgtttggaaatacgtttggcagggaacaaatcaggtcaaatcaacaaatgatgcaaaagttacacagccagtagcttctattcagatctcaaaaaccatgtccacgaggaccatgacacgttaccagacacacatagttatgcttccacaaaattgctcagcagcaaaagcttatctatcatagttcaatgctaattcatggttttaacaacaaggtggcagatgctacaaatgaaaatgaaatagtgcaatctctgcagtcaaaaagtagctaagggcaatagactcaagattactttgaaaaataaatcatcctatgataatatctacttgacattctatgtgaagcatcagaattataatctgtacctattgtggcaaattcctcatacctgggtgggatgctgtccagggccatcccctgcattgattacaggaacgctagcagttgttgctgctcttttggcagcaccactttcaaagtgcctcatcacaattatatcagtgtaaccttcaaccgttcttatagtatctgcaagaagtaaagttccatgaaacaccaattttagatagaataacaatgaaagaacccactaagtactaacaaaactttgcattgttaattgaaaggacataccttcaagcgtctctcctttagcagcagacgaaaactcccttgcattctcagttgtgagaacatccccacctaatcttttcatggcagactcaaatgaaagcctagttctagtggatggctcataaaacaaagtagccatgaggtaaccctttagcatttggctcctagatgacttgctttcaatgctctccatgctccttgcaacttcaaatatggcattgagagtctctctgtcaaattgctgagcctcaatcacatcatgaaggtgaaatttttgccccacagagaaggagggtgcactttcaacttgaagggcccccgccctccacagaatctcatcacctttatgtgaaagtttaacattttcaaagactcctgaatgcccaaatggtgtttttgactttaaatgatcccatggctgattgagcaaacagcatggagaggattttgcagccaccttgggatgagacacacccacatgcatagagcaggagaatagcaaagcagcagcactcattgtgttctattggagtacaagacaaagtgcttatatgttattacagaagcacacaaataaccattaattgcatactcaagtttcaaatccttcaactctcaatataggaagcaaaagggcatgcatgtaacttgaaaagatattggaaaaaaaaaacattaattaaacttgttttgagtggaatcacttttttctatgccaagaaacaagaggaatcacttttttctatgccaagaaacaagaagaatcacttgactataaatgtatgtgctttaaaaacatcgcttcagaatagacggcagaaaaattcggaccaaaaaactattgaagatgataacataggaaaaaaaaaagaggaagtatgatgaatccaacacagattttctagaaagaaataacgaaaagtttagagaagaaatagaataccgtgaggttatttgtggagagtgagtagttttgttaattttgaaggccgacaacggctacaaaacagcgttgcgaccgtcgtgcaagaaggaacaatgtgtgtaggctataagaggagacgacctggtttaaaagtaaacctttgttagggattgccactctcactcccaattttactatttgtaccctacgtgctttaaaaatgacattattccaaaaatactctttttaatgaaaaacatgattctattaacaaattagacaatgagatcatgtctccattatgtaagaggaagtgcaacgaaaaaaatattatcaacgaaatcatattttcattgtataattcttttgcactcttgtaatcaacaaaattatgtttatattctatatttttctttacaaatttttgttaattaattataaatataagttactttttttaagtaatacaattaattgtaatacaaactattattttttaattaagattaaattaattaagagacaacttacagtttttaatagtagtcaatgtcatttttaatagtaattaaattaaatatgatattaatttatatcataattaatttgattataattaaaaaggataatttatatcatcattaattcaaattttaataaaaaaggtaattcatatcacaattaattaaaaaaggtgatatgtgtaacgataatttgtatcataattaattcaaccgttattctttttttggattttctttttaaaaaagattagagtgggagaaaggaaaagatgataacaatcatcatttaattacaaattttcatatacaacaaatttgttgaattttataataaatatgtcaacaaacttttaattgatttagtcaaagattatttttaattcatcaatagtgtaatttttttatcttgtacatgtttattaaacttcaaataaatccttaaaatttataataaagaataaataatacatccatcaagagtataaaaatgttttaaattgtcctttaatcgcatgttgttatgataagtttattactagtaaatatcttaaaattatattatagatgattttaaatttggttgatcatataggagctaaacctattatactcaaattaaaaatgtcccgtggttttgaagacttgtttgtaatttttatattaaaatactataacaaaatttgcttaaagaattgttaaccataatgcagttctttaaaaaaaaaaaaaaaccataatgtagttgttcacttgttcaaacacttttcctgcgtatgtacgtgaaaaaaaagcaaactaattttattgttttggctattttaaaagaattaaaaacatgtcatttttgtttgtacaataaagttcataaagcttgcaaaatgttttgttagcgatatatgctattgaacacaacttaaaaaaatgaatgccttattaagatttatctcaaataatgaaagattataatatagtgattcgtccgatgtaacatccttttgtatgcatgacattgacgaaataaaaatctctatacctatgttgaatatgaaaacgatcaaaactacaccaatttgcaaaagcaattaacgagtcttatgtattattgttgcaatgctcattagtgtttgaatgtgaactccccatgacagatgttatagctgccacaagagggcagtgaaattggggtctgctgtgatagcagcagtggctgcatttactatgttagcaaatgatgaagttgtgtccattccctgagactcatgcaagccagcaagccagaaagcttagtttgatcacacagtgccagtccaaatatttttggaaatgacataaacttatgagccaaaagtgggaataagaggccatgttggccctgtggtaattcactttgtagctgtaaggaattggttgcattatgagtgagatccaatgtgatggtgggaaatggggctgaggtcaaagagttgccatgttctgagagcatggaagtgaagcactttctaatatgcttggattgattaggccatctgagcttggcattggtccagaaagaagcattgaggcagctgcatatgttgtggatgccattgcctgggctgtggatggttatgctgcccttcatatgttgtgatcagcacacttctgtctacagcacacctctgtacctatgaacaaacataaatccactatttggtaaaccttgatttctctgtataatactcatggagtttaacaaattaacacacacacacacacacacacatatatatatattataaagtttttgtactatcaattaatcaaaaataatttttggtatgatatttaagatatacttattataaaagtctaacaaacttattatacataatattttgtgattgagtgattgtataaaaggtgttgaattatatgcatatattatttattcatgttaatgttagagacaaaatgtatcaattccttcccaatggctttaatttgtagccattagctaactggcaaagtttcattacccctcaagatttcttagaaagcaccagctgatacaggctttttgatccctataacattcacactctaagctgtatatcattttccatgcccttaccaggcacttttgggtagcgtatgtccccaaaaaaggagagggatcgattggtaagtacaatagaaattcttgtataaacctaatatacttgagttgggtgtgcattactgataattaaagtacagtattattaaataaatcttttgttcactaatgtattgattataattcaattctttgttaatttagtgcactcaactcaagctaggtaaagtgtgctaaattatattaaaattttgcaaattaagttttaatttgtctttcccccaccagaaatgtcttgctagtttcctaataccgtaagagaatttcctccttgctttaattagctagtctcagcagaaagaacaatttaacgcaaattaaagaaaaaaaatttcctagcaagagtgcatacttgtttccttactgggcaaccagtactcattgtgcaacgataataggctcttggaaaaggatttcctttcgccctcttcttcctatactttcgccattggcatccatctgcaatctgtaataaaggattcatccaaaagaaagttaacacgtaaattttccatgatgtattttcaagaaacaagaaattaacgtgtgcaaacttcacattagtaaattacatcccctttccttagaaattagaagtcatcgattagctagctaactaggctgaatttgttaatgggtaaatcacatgatgttactatatattggagatgatagagttgcatgtcaattttactttatttatataatttactaaccattgaagaaaatcttgctcgaactgacacacgagctttcttgattgacatgatttttgaagctggatccaatctaggaactttgttactgatcaattcttggtcagcgtgcctcccttccatgcattctagctttaatttgcactttcccttccagcagaatccaacttatctgtctccaaaacagcaatatctttgccatgtcctaactcaaccatgcttttgcttcctctcagtttcccctctaaagattgctgggtatttggctcatcctcgtcagcaacatccatgtcttagaatgactttggaaccatatcttccattttccctatcactccgtaattctacacaaaaccaaataaaaaacaagtgcatacatgttttcagcattgaatatatgatcaaatgccagatctattttttggaactcaataaatttattaagatggatctatcaagtaaactcaaatataccactacttatttattaagttatttgatattcaatgttataaaaacaaataaataaattaccccatgactatgctgcttctgcgttagcttgacaatttgcatgcgtagggcattgcagttattgttcacctcatcaaccaacactcttaaaacttgattttcagcattcatttggtccaattcagttagcaaagctacaaactatacccataggaataaattaatattaattactatatattcatcttaaacgtgctacctttttgataaatataaatcaaacatatataacatatatacctagacacaacaaccaattagggtacctcgtagctcttatcgtccatagtttccaatgccgcatcttctttcgttgatctattgacaccagtatcattcttcgtaagaagatctgagctggtctataaattaacacaacaagaacataattaggtgcccatatatataattaaggtaaaattacaattattaaatctaaggaaatatttaaatgtgagtttggctacatatatagtacatacatcaacatgaaggtcctccacactttgatgatcatcatcaatatcatcatcttcactctcctttctcttctgagcaaaatcaagctcatccatgacaagtggtgtccttctaaacgacatgactggatcagaagaattactaccgttcacaatgggatcattccaagtgggttccatgttgattatatgtatatgtatatgtatatatatatatacactccctattatgttacgtagtgtgcttggggagcaagaaagtttttgcatgagtatcaaaaaggactcacgtagttgtgtctacaaattatttaaagggtgaaggaaaggagtgagaaggggtagatgtcagagatagatgcaagggagtcggcaacaaaaaatgggttttgactaaaaccaaatattatgtgtgagaatatataccaagatgcagtagtgatttcagaactgaggtaagatgcccacgtgagtgatttctaaaggagaaaccatatgaatggcaatgagagagactcttgacttagactaattactatttactagggcttgaaatgttccactatatgtaatttaccatttaaagattaacaattatatatatataaaaatgaattgaataatttattttattttattttttaaaataatatttataacaatgaaatatatatttgtgtgtagaaattttttactcatgtattatgaatttaaatcacatgaaagaaaaataaacaaccacaccataaaattagagatattcatggattgaattaaaataattttgaagagaaaaataatttagtttaatagcttcagttttcttaatttttcatttaattggtttaatttaaatcttaaatccagtttaatacagtctagagtgctttggattgaattttttttcagttgtagtcttactttacttttctataaataaactattaaataaatgataaaaaatattaaacataataaaaaatgatttttcaaaaaataacttaaaatgtcgttcaactataagtcattatatatcttagttaaatatattttttcataaataagtgtaaattatatgataattttataaatatataaaagtttagtttggattgcatcaacattgaaaaccaaaactgaaatctggtttaattcaataaaaaaattagttttttcgtttttaatttgttcaatttttagtttattcgatttattagttttgctttttcagttttatttagattggaccgatctatctctgagcactcttggataaaataataaaagtgtatatgtataattattaataacaaaaataaataaataaataaaatcttctataaaaaaatgggaaaaataatgggtcaatccattgaaattcaacattattttttattttacatgttttaagtttcaactctctagaggacactttaactcaaagatcctcaactaagtgtaatgtttatcgccttgtcaagacaattgatattttcattacagtaactgagtaaggaccatccatattccataacaaaagatgtccatcgttgacttttccaaccatatattgttatctttattgggtagagttgttttattttataaaaaaaatctaacagctgttacaaaacgttaatagtgatttagaaagaaaaaaaattattattttgaaacaatacattaaagtcaaccatgtaaaaaaatgcaaaccaaggagttaaatattattaaacaagggaatagataattttggttgccagttaagtggcattttttataacacgccttttctttttatgcttaacgttaagggttcttttaattaatagtacgcttttaacttatcaaaagtatttgtacaaactacaggacattaagccagaattcaaaaaacataatttgtgtataaaataagaagtgtttcgtttaccataaaatttctaaataaaataaaaaactcttattccattatgttcctttgcttttcatatccttcaaccaattcaaacagccaataaagcaaatgccgatgagagcatacatcaccttccaaaccagattataaacaagtaattgtttaaattgcaaattggtacgacagttgatagattcgctacactattgaatctgtcatatataagcatacatcattactacacgttgttctcctaaataaatactatatatctctgttaacactaattactaatcctaaatgtacataattatattatgtcaacatattaaatttacattatgcctacttgtataataggagcacacaatactaaatgcactctactgaccatcctgcatatataaccaatgctccaattgactaggtggggtaaccctcttcctaattaacatttcaacagtgggacatgttctcttccttcctcccctgggccttgacctgaactcttcatcagcttcttcaaaatccccctgaagcaaggaaaattatgagcaagtcaatgaaaaggcatgactatatgacaatatcacttataagaaaaccttttgcacaaagggaatagaaggggaaaagaacttacaagggtaaaaacatgtttagaagttttttcgtgattatctcgtacatgtttgtaagcaaatctcatgccacaatcaggaaaaccacaaacaaaaggcctttcattaaagtgcacagccttcttatgcttatcaagattagatttctgttgacataaaaccatgaacaaattaaaagaaagttcaacttgtaaccaaacagagaactcaattatagtatactctgattagatttaagaatgaggagtcttactcttgagaatgtgcagctgcaacccttaaactcacattgaaaggtctctgatgaactgccttcgacttcatgtgatcgaaggtgacgcttaatattcttcttcagttgcttagtcccacaaatgtcacaggtcatatattgatgggaggatttcacatgggcttgaaggcactggacattagcgaaatgtttcatgcaactaggctctaagcacaccacatctactgactccaacttaactgcagaataaaggctttcttcaaaattgcacccaacatctttcactaatctaaataaacaagaaccttacaaacatcccatggaaatttaactaactcaaagaattacaaaaggaacaaaacctaccatgagaatcttcatgtttttgtagctgtgatgcatatctaaaaacctttccacacccaatctcgggacatgtatgctgtttatgacttttgtcactagtagaggtagaactgttgtcatgaatctcctcaatgtgtcttttcatattgctttgcaaagagaactcactgttgcaattctcaacagggcacttaaaagtctttccttcatgctgaagaaggtgccgaatcaggtggtccttccttctgtaacttgcctgacaatcatcgacaggacacacaaatggcctctgtaaccattggaaaatactgttaaatccagaaacttacacacataaaggtatcatgatgctctgacaagaacaaaacacaaataaacaaactgccaacctcaatttcgaacagagcgtgtgaccgaggcatccttgatggagcttcacaggaggtctccctacctgatactaatccatcaagttcatatacgctgcctcgtgcattttggagttctttttctgggatccaatgcttcacactattaatccataattttccaatgattttagaatcttatagattactatcctgcaaaatatgtattttcagtctatatacaacaagtaacacaatcaattcacaacaccaagcctgtcttccacaaataaaatgtttctcaaggaacacgacggtctataaaacatacttagtttaagagtttcacttaactgaatctatgttttttcttaaataataacaatatttaattgaagagtccaaatacctcatttgaatgacttagcatgtgctgcaacaaatgggcttgttttttgaaagtggcaccacattcctcgcaagtgttggatttcgaagcctttccttcgggacctctttcagctcttgctttttcatcctcttcctaaaaacacatcaaaagtaaacaacaaaaccacacataaccctacataatgatctaattcaagcagggttgcttataaacggtttgattttgcagaattagaaagaagggtaccttgtggtgcgaattgatgtgggaggtgataagggtttttttggacctgcagatgccgcagtactcgcagaaatagcgtctaatatctttgaatttgggcctttctttagtttccacggattcacacatttttatggtgaagagataaagagaactattggagattgcaaatattcgatgcgctgatgagggttttccgggagagtgaggactgcgatgtgcgcggcggcgttgtgaagctacaaatgtgagtgagagtaaaagtaaagctagggttctggacaacggaggatttatatagtgttcccatacgatgtcgtttgcatagtttaatgcccgccaaataaccaactatttattaagttataatatatgataatactttgagtaaaataagaagataagtattttaaaagtgagtctaggtcttaaattttaaactgtccaaaatttccagaattttattttattttttcttccaaaagtcctaataatttactcacgagattataatattttgtttgaaatatatcaatttttttgccacatgaaatatgtccgacattacataattccttgatgttgtatttgattgataaaataaaaatagaaaagacaaaacagaagaaagagatcaaccaagtactggtatatatttgttttattttagtgatttgaacataaataggaatgctaaaaacatatttactaaaaatattatagttcattatatggttttaatattccaatttaactaatttataatcaatatattttcctgtagttatattacttgtttcaatacttacttttaccataccatcttaatcataaaatttatacgttatcgtaatttgcaaaagaaaaaaaaatcaaattttgcacgtttattattaatttttacctaaccgtttcttttaattttagtagactactctaaatattattattttattattacgaaaaattcaggatgtttccgttgtagcaatggactataatattaccaaagaagttaaagcaatacaattattgtcagccccatatagcttttacaagttagccatcaacatggctcgaattttggctctaagctcatcagaaacatcagttatttcaggtgattgagatggtgcccttggattagataatccctcagaagcctccctactagcacgtccaacttcaccacttactactgacttttccgatttcataattatctccccctcctccagctctctttctctttcagcatgagatctgctcttatgccctacacttctgcttctgcttcgatgcctatgctcaccatcagatgaactacaatcttcattagaatggcaagaatgtctatgctcatggtctgacaagttctcatccctatgtcgttgtttggaagagtggtgcttttcatcagaggagctatcatatttatgacgacgatgccttgggcgatgatgttcatcatcagaagaggagctatcgtgcttggtccccctgtaagaatacttgtctttggaggaggaatgtcttctcttgtgcttatgcctgtcccgattgtggtgtgaagtacgatgtgagcgatgttttttcctggatcgtttatgatcccttctatcttctttgttttcttcttcttcctcctcttcatgtctactagatcttgagcggtactttctttttgaccggcgttcattatcatcaacagtaagtttctccttagatttctgacttttatctgaattattatcaatagaaagattctcctcagacttttgacttttatctgaattatcaacatcaaatggaacagaacttccttccctttctttacccacaagattcccagtctcagcatctgaacctgaaactccagagcctggtggctcaactgataaagctcgtggcagttcacttgctccaacaccacttttaagcatggctgcaaacatctttgctcgtttcagtctctctgccttaagcttttgctctttagtcatgtgaacttcagaggagtccgcctcacctgctgctgccatagctactttttctgcaatagccttggcaacaggggcagaagcactagcctttgcctttacattcaggttttgactttcaacaaaaccttgtggttgaaatgaatacagactaccagtcccagagctggacaaatacccaccatcacttccaaggccttgaccactaccacttgatgtcttggtaagaacttccaaatggggagttttaatacccctagtggcagcctgaagaatagctgcagttgctgctgcatccatactaattgtgttttgagcttggtcttttggaattggaccttgatcatccttcttagacttgccaataatcatcttgaacttttcttttctgtccatgtcatatggtagatcagaagccatagatccatgtgaaagattgtcactaccttcatgtacagcagctttattgtcccctgtacgacctgctggattgtgcttctggtggcccttgcctagtaacttagactacaaacaattaggaagatcagtaagtagcagctcaaagtcaaaattaacactaccttaatcagtcccaaataattcatagaatacacaaggtgcaaaaaatccctccagaacccaaataaaataattaccaaaatttgaattccatggagaaggaaaatctttgaaaggcgaagttgaataaaaataaccatgactgcttcaaaaattcataatttatcacaactacatggcaaggcattatagctatataaagcatacatgccacatgcatacaaatttgcataacagacagaaatacaaacatgaccaatgattaattagaataaccaacattagggtactgcagataagtttacaggtgataatatcagtcaattaaattatgtttttgctttagaggggagggaagagtagggtagaagggaacaatttgaatcacattaattgaaaattaaaaataagctaaattttaatagttctgagaaacacacctcttcagcagtttgaagaactttcagatagtaagtatgatatcgattagatggcagaagaaatgggaaccttccatgaggtcgatcctgttctgccagaacagcctcaaattgttttccattttttaagatgaactcaactatcttctctatagctctctttaaatcagatggaggttcaacaactgggagttcaatcttagcagtactcgttacagaagtttgcgacttgttctgtgcattagatactgaatccaagccatcacctttagctctagctgtggttacagtcttaacagtaccaatagaatgattccgctttatgacaggaactttttctttcaaagagggtattggatttttagaaatgcttccatccttcttggccacatctgaataagattctgcctgatctattcctggagaagtataattactagcagcatcaacagctccctcacattcttttttctcaacatcacaagtattctcagttgtaccatcctcgtcctctccggatccatagacagatccaagcaacgacaatgcaccacctgtttgatcaagcccctgagtcctattcatgtcctcagttgagcttccatcatctttgtcaactttcagaagttcttggtgatcaacgagaaacctaaaatatgcatgaagatgatgatcgggcatcaggaatccaaaagttggattgtctccttgtttcaccctcagaatgatttctgactggcttccatgtttgctgacaaatgttgcagtccttgaaataatctgatgtactttctcatttggaggctggaaaagaaaaacaaacaaacaaaaaaatgtttcgtcatcaataaatgtgaattccaaaattagtacaagtataaacttaaaaagggtctagccaagcagaatatttagacacttgtatcctactaaacaaacacaagacaacctcacaaatactttgataatgataaagatcaagaaacagaactttatgaagacatgtatcattccatttgctctcaagaggtaaggaatcaacaaatttctatcatcctaatcccacctgcacggccccttctcatgacatcaaaaggaaccaaggtgcctgtgaatggctaccttgagtcacaagaactccgtttatgctccgagcatctgaaacttagacattgtaagccttagaataacatatgtaccctagacaattatcacctaatcacattggttaaacaatgaaaggtcaattaaattagtaacatcggaaaaccacacaatttaaagtatatattaagacagaggttactcaccaggttattgagtaggctttctggtactgggaatttaggatgaaaactagactcagtatcattgtcctttgtctccatggacacattagaatttccatatgaaaaggcgacagcatgaaagccagttgaactcactggatctgaaccataatctaaacacaaagaggtgatattcttcatcagaatcaaatataatataattctcaataacaacaaaaccatccagcaaaaacagtagttgcaacacaacgccaaacttaaattgaagccaggtgaaaacatccttacttgtattcagacacgggaaccgtagcaaattaaattccaacctgcaaatgtggagcttgttgttgccggaaaaaaaaaacactctgacatagactcaagtggaagttggattgttccaacatgcacggaaaaaacatgtgttttgctagccattagccaacaaagaacccacgatcaactagttgccccaactaaatgtgatgtctaaccaaatatatcaatgtgtcaaaatgatgagaacaaattgaacaaacttgatagacaaaccttagagaattacccgtgactgattattaatagcccttgctctatacacacatcacaatatgtcacacacaactcaaaatatcaaagccctcattgttacaaaaataaagattacgaaggcaagcttttttgttaaaccagaatatgttctcaaaacctttcatcatgcaaggaaacattctagctaaagcccacaaagaagcaacaaaagctttatcttaaaccgctgagctcaatcaaaacccatagtttcactcccaaagtttaaggacttcctcgaacctaattaaacagaacaacttccatttgattgacttttctcaccgtggcctatataaaattaggatgaaccttgaacactaacaaaacttcccaacttctctccagggaagaacataaaacctcatcaaaacaaaatcactaaccaaagctcccatagcttcttgtggtgaaaacataaaacacaacaaacaacagagttccaaataaaacagaaacatatttggggaaaatcaaccctaagaaagggaaggaactagaaagtaaaaagtatagaggaattgtgtatgaggttaccttgtggctgttcgtcgtcgggagaagaggaagggagatcgagatagcgctggtgatcgagatcgggttcgggcggaggagggcggcgcttgaggcgcggggggaggggagcggagagaaggtggcggacatcgtagcggtcgatggaaagagagttccattcaaccagagcttccgctgagttcacgaacgccgccatgccgtcgtcgtcgaacagcatcgcgtgccgccctgccacctccagatccatcgcttctgcaacttggttgattatcaaaacgcacaatctctctctctctctctaaaatatgaaaacgatgatgattatttgtttgtcgctatgggatttgaaaattatgaatgaacgaattttgggtaatgacccgtcggaatgtgccctaccggctacatctatgcacagggcccgggttttagttggagctttgggcctttggcccattcgtaaatgagttgattgtcggctttctgaaataattaataattaataacaatgtgtatattctgcttcaaaaatacaatgtgtataaaacttttacactctcatcagtatatttaagttcaattctaataattagtttagtctctcttaatgtagctattctgactatgaaactgatgtagttagttttaatcaaatatcagaattcgagaattctacagtcagatagagttttcagaggtcaactataaccaaaactacttaagtagttccactgccagcaagatgttgagttttgtccacactactaccatgccaatttatttagcgcgagacaagtttggtaaacgattttttcataaattataaagtaggaaattatgatttttatgtttaggatacgattaataaaaaaaaaattgtcagaaaattatgatttttaagaattaatttagttcactttcatgtcaaaacacattcttaaggtgggggacaggaatctaattttttgaatgtaaaaaaagttttaactacatattttacataaatatttaattatcaaaaaatatattaagactaatcaaatacacattcacacaaatcattattttatgaaatttacttttccagaaatcatgtttcccagatacaaatcaaagataaaaccataaaaaattatttaaaattagtaatattactatattagtcagattacaaaatggtgtgcacttaatcactattgagtagacatgataaataacctcatacttgtgagtattctctagaacttatcttgactttgatgaagaatatctactttaattacgtattattcaattttttaaagtaaaaataatatcaaattatattgtacatgtcactattacatttttttataattttttgtcacaacatatatatatatatatatatatacacataatattactaattttataaagattttattgttataattttcaaaaatataaatcaattaacttaataattaaataaaaacataattgaattctttattttttatcttttatttatttgttatttattatatttgtatattatttgaattaaaacataattaaaattttaatatataatttatttataaatatatgtaaattaaaattataaaaaagagtataacaggttatctacgatgataaaatccaatgagaatgtatgaaaaatttaaaccctcttttatttccgaatgcgtatcgcattttgcgagaacggagaggcaaatctgtccccgagcagcgccacccccattgccatctctaattaagcaaatatacctcattttgagttcgttctgcttatttagatagtatcaaagcttttcaacgagaactccattgcacatcgagtaattcttataaccaaaagcctcaaaacttcgacattagcttcaatagaaatctatcgtctgagtgactaatcagcaaattctagccaaaatcaaacgactaactaccatattcatccaaacaaaagttctactacgataatgtgacgctagatctttaatgtcgaacaataaatacaaattggtctgataaaaagaaagaaactatgaattcttttgatccacactttgaagctcaaggagtgatgcaacaatctgattgattattggattgcttacttagtagtctctgccttgatcggacaaaatgtgatttacatcagaaatccaagtatggcaagaccttgaatgtttctcgactctggctaacgtgcataccctctacatggtacgcacggtgcgaacaagaatgttttaaaatggttgtaccttgtgattttttttttttttttttaccgttaagatttaaagagaagagagtggtgaggcggtgatgaccatggaagatcttgcgttgccactgaccacaactttggagttttttcggtgcgatttcagcggcagatctgacgcttttattttattttatttagtatttaagttttgattcttatttatcgtaaatacttgttttatgtattgttgctgattttttgtattggtttctttgatttttttgtattggtttcttagatctgaatgttgtacgctatattcataagaaaatacatgttattatagatttgaatccgaagatctgagtttaattttcgtttatggatggtggttttatttatttatgtgggtgtgcggaagaatgatgatggagtgatggagggaagaggaggggaccgaagaagaagggtatttcgcaaaatagagaaaaatctaatgtagatagttctacagtagtctcatttattccaagatctaacggtgtaatatacacgcaccgtgcaacccattctaaaagtagtattcgcatcatgtatagccattaggggtaccccatgcaaaaagtcgccatgtttttcacatggtacttttgtttcgtgtatttggaacaacaagaactgtatgctttcaaaaggggatcgtcatcagtaactgaatgttttcactgaattaaaggtactttggagaattaataaagtgaactcaatccgtcataattttgttagatgcagttatgctagccaaaattaggttaactattcagttaggaggaaaatactaaggtcaatagtatactgtagaaaatttaactttatgccccgtttttagttcgttcacgatatttagaagtaatacatttgattcctagaggaaagaaaaagaaataataaatttgcaacaaataagccccctcgttcaaaataaagagaaataagagggagggaaagagaaaacctcgttccttacccacacggagaaagaacattttcaaaggaaaaaaaaacagagaaaaataaatagatgaacacaaatcatacaaaagtagacaccatagtccctacagaagttggcgattgcttgtttaatagttgaatggttgactggaggtatctgtctttggcactcaaacatgacttggcagtttcgaccagtgtaaggcaagcagacaataactcattgtttagctgtcaacaatcaagaaagaaaccattattagaaaactgaagtagaatctgcacatgattcagatacaactctgcaagttccaagcaaccaaattcatttggaatttgtggttacaagttacaacagagtatgataactttcaacaaggattcatcccctaacataatactaggtaaggctatgctaaaaatgaataattcaaacaagaaaatgttacgaattacaacagaacattatcatggggactcataagaaaacgcatattctgacttcctttttctgttccattcaatcattaggatttaaagataggtttaatatgtttgttaatccaacaaatacgacaaaattagattttaatccctaaaaaattataagttttggcccttatgaattttaagagttttgaaaatgattgattcctgttaccatttattgataacaaatgtatcgagaaagtgatcactgttgtggaatgcatagatgcatgtcaggccatccttaaataagatatatttcacccataaggccatacaagggtgaaacagaacaattttgttgaacctgagaaatgaagcaaacacgtatttcaattagttagttaggtgtctattagtgagggagtggggtaggttagttgggtgggctaccagggccgcgatagtgaaacaaaaaaggcatattgcctataaataataaataaagaggggaggttgagagaaatcatcttatcatttgagaaaggataatttgaatcttgaatatccagggaaatagctcgttttgtatcttcaaaacctagccaaaggctgctaccacattggcacagcaatcgtgatttagggttcatcaataaaaattcatcctttcctttataattatatactgaatcggtttctgacaggaacaaggacatttcatttgcctaccttttataacaaaatgctccaaactatattatataggtatagtgaacaatgtttattcataaatttctgtttatagttaaagaaatattaaataattaccatgaatgggattaatctcatggggatgccggggcagagaccatatatatacatacagacacactacaaaccagttaatgggttaactgcctgttgatttaaatacccatttgccagggtaggatgcctaaattggaaatagttttgtaatgtttttcaagaatttataaattgtaatctgagtcctctttttttcctttgtactttctccccacgtcaatgatggtgagaactaagttcaaaacaactacagagcagcttaccatgaaagatgatgcaatgcaattgcaagcttcaagtgccataattcctcgagcagcctttattttgttataataaatcagtattattataattggttaaataaatcaaacactattaattcagccaaaatgatgatacctgggaaggttcttgttgaacggcactaagcaggttttcaagaacaagtttagacaaagaaacaagctcttggttgtacgatgaatcctcatagtataacatgtcattgcctggaatctggaaaggaaaaaaatatattgttttgagaattaagatacaaaaaccataaaccataacatgtcaggaacaccttgatttacaaaaccgtaaaccttacacttgttatagtcagtgcaaagtaaagggaaggcaaattagattcactaacaggctcagaataattatactacattagcttaaccctagacctttacttatactggagctatgaccactaaatgacacttacatccactacttggacacaaaacaataagcaagacttctctaaatactcttcaacttcaatatgttttgtccattttggagtgaaagagtagatatgtcatctttattccattaatgcaattgaaaagaggaaatgcaaagctataccacttatacctgtgcatttgcatgatatggcagtctcttttgtgataaagttgtcaataataatatgatagcagaaaaaatttgtgtcctcatttttggttcaaacctgcaacggttttcaattcattcatcgaacaagatgcacgaagggagaagagagactaaaacaataagggaagtattttggggggcaagaagcttcgattgtgatatatcccaaagaaaacttaccaagatcgggagctgatcaatctaaataagctatttgggaaataggtgactggtagattaagagtaccttcaataaagttgaagaaaatcatagtaaatacatgcattcaaggaagaggtaaaaaggaactagatctctaacctagtacctatatatttctatacaaatcatagtaaatacatcccagaaagagagattttgaagtgtctatgtatattaatgtgcaaagctgaaacaatatttacaacctggaaccataattaagaagccacatagctttctaatagatgaaactagtccttcaacatcagttggagttcggaagcctacaaaatcaagcaaatcaacagtcaattatattataagaatgctatcgagagtacagacaaaagtcattttttagaaagccatggtggcacaattaatgtattttaaatacattaagaacaaaaaaatgctgatacaagcaaccaaaagaccaaagagaatgatgctcaataaaaacccctcgcaaaaatatggcaggtgtctttaacatattgtggcatccaattttgtattagttatttctaagaactattgctaggatacttgtattcaagaagagattagtgttgtttaaccacatttcctttttaagttctaacttttacgcattagaagccttgggtaacaataatatagggaaaatgaccctaaagtttggcactccaaaaaatttccatttcagttcgtatattgattgattaagcataaaactaatttaaccaaggatctacctattttagctctgatacatcattttcagttaactataaatatatattggattgctagtttctgactgggttaatcaataaatgaagtgaaatggaaaatattttcacaagttacacctacggatcatttagcattgcattattatagaccatgcatgtatataggttctacatcaacatcttattggagacttaactgtataatataacaatttccatgttagcttttaagctctatgttataagaagccccaatccttgttgggttttaggaatttgaaagatatacgaagttcataaatggcttcaaatcataagatattcgacgaagaggataaaagagaaaataaaaaaataaaaaagatgctcaaattattgtattcaaatcattagatactcaacaaaggggatagaagagaaaaaaaagatttacaaggttcataaatgccttcaaatcattagatatttgaaaaaaggggataaaaatgaagaagaaaaaatgcccaaattattgggctttcttcaacacaattgactgaactgagtcactaaaaaatataaaacaatttatagtttggacaacatgaacaagttttggttgtgaattgtgataattgttctcaaaaccttttaaccactaccgtttcatcatagcacatagaaaattagcattgaatagatttcacaaaatagacatgccacaagtaacaaatgacaaggattcaatttcaagtattggttcttagtactttcacaatgcatcagcaacaaatttacaggttttacatatcaactaaccatcaattatgtctaaggtatgcaaacagctgatcgctgaatcaatcaatccatctgaatgagaaaccaagccccctaagaatgcaacctgaaaaattcaaactatgaatccatgaaaaatataaaagtagcaaaaataaacacaactttgatgtgtcaagaactgacatacctacctctgcagtttctagaaaaagatcaaactgcctgtgagcataaatagaaggtattgtgacttcactaaatgtgacacaggatttgacaaaactcagatgtttcttatcacatttcaaagcttgaattgctaaagaattgctagagtgaacaagagtttcctgcaagaaagcatgacaactttatcacttataccagggcattttgccacaacttttaagaaaaacaaagacaaaccttaagctcatttaatctaccaaaagctcctcggcaatcaaccagaaatgctaaatggctttccatctctgttccatattctacctagtgaataaggcaatttagagtcaacattcataatcatggcaaaaacattaccacaactaaagaaagtgaccatagagacaaataatatcaaaaggaacaggttaccatgtgcacaaagcgagctattgaacatgccacttggccatcatcatcttttacgttcataatctctatattattatgtagtgtcagagaaatttcaaaaagcaactgtatgctcgtcggatcactaatgcgaccattcctgcttaacaaataataacagataattccatggtaatgaaatgaatacttaataaattatactcaccaatcagaaagatagaatcaagagtatgttgcaggcagctagcatattatgaaacaaaaacatttgaaaatgcaaaagtaaactctgtggtgtggatacatggttaagttttgattcaggatctggatgtaatttcccatggaacttttttgaaagaaaaaaatcccatcaattttaattgggtttcaatgaccttatttaatgttaacaaagctgactcaatgtcttagccttatagcagttcatgatttaagaaaatagaagttcaaataagatgtatttttcaaaattagatctaagatagtagacttggaagtgtaagtctgtataagttctgtgataacaattatctacgttagtgcagtcactttacagcagcttttatgtgcaagtacagcctatacaggggatttaggagaggaaagaaatgaatggttatatgaaattgtacaatgttagtaggaattttggtgtatttaatgcagcctaattttggatggtgagcttggagagaagaactcaacttttgagtggatttcaaatatcctgtgccaaaatgacttgtttggatatcaaatccaaagaattttaaaattgaggatatttttctggtaaaatgaagggatttcaaaatgaaaaaaaattgaaaactctcaccccaaaactctagtgcacactctatcactgttgcacctctctcccttttcctccctctctcgtatctatgcctctctctccttttttctctttgacaccactctctcttccacacctctctctgtctctccctttctcttcaacacctccctccctctctctcctatctctctttcgcgcctctttcttttctgcctcttttctccttttccccctctctctctccccctttctgacatacatcactttccctctcttttgcacatctcttactattttgcacctctcccctcctctgcctctctatttattcaacagtacggccttacaactcaaaagaaaatgttttttttaattgccacagaagtaaaggaatttgttaaattttaatataaaatcattcacatttcttcacctaatagcttaaattttgggtatagttggttcatcatatgatatcaaagcctctaatgaccaagcggtctagaagttgatccttgtcacactaattctaataaataaataaatgaatttcagcacaagataagtgaacttgcaatgttcacacttcaagccccacagcctctggcatgtggaggcatattagacatgtaatataaaatcatttatggtagttgttcatgacagagtttgtacacaaatatcaatcaactcaattaagtaacaaaagttaaaaattcttattcctcaaactctcaaagaacatacatatcatatacaaactagatgttggaaaactaccttaattgcggtcacccctagcccatctcagttgcagcctctttgagggctgcctgaattacagcctcaagggtgatggtttagtcccacatcgactagtgatatggacaagttaatgtaaataagtggagggaaaccctcaccttactagcaggttttgtaagacttagttaggctcaaacccaaaattctaagactagagaaccaaggtatgtcacatgggagtgtcaataagggtgatatggaatgaaaggagtagagtaaaacaaaatgtttgtgataaatggtaccttgtcgccatattaaggatatgcaaaaagacaacatcctgtgacttgccatacattacatctaagatttcaggaaaatgatcctacaaaataataacaacaaaaacccaaatcaccactagtatttatagcacatgtattgaagaatgaatgataaagaaagatgtaaaaagaaagatgatcaagtacaacaagatatgattaggaacataccagagaaaacacatcttccagatgcttaaaatgagacagaagcttcaccacaagagattgcaagctcgacatttcatcctctgtaactcctttattccaagtacgctttgaaatgccttccaaaatgattttcaaatggttatcctggcataaacaattgtatttagaggaaagattacaaaagaaaatattaaatattattctagtcatttgaaagtaacaggtatatcaatttgcaactaaactttgtaattggataacaattaatccatcaaggaccagagtttaaatctcaatattttctatggaatttctttaaattgtcatatatatgtttgactgacgatcgtctacttaaagaacataccaatagatagaaagaaagaatgcaaagaaaggaggataggctattgtccttgcacaaaaaagcttagaaacttagttccagaatttttagttatagatctcttgttacttttgggggattggcttgtacttagcttccttatcatttcagttcacagtacccttaccctattgactatttaatcaagacaagtattattggtaattcattcagcactaaggaatcaaattcactaccttcttgctaaaaacactttgccattaatttgttccaatatcggacatcaagcttcattcagaaggagcacgttcaatctctaggagattggaatcaagcaagttgtaaattaaaaagttcaaagcctgagatttagcaaatgggagttactgggaagcaacaaagcttgccagcacacccactcaacctacaaaactataatatgtcgatataatgcgtagatctagatgatgacgacacaaatgccaaacattggccttgtagaaaacatttgggtaatataatgttaactgcctagtcaagacaagcattagttgctcctaaagagtttcaaacctcaaacctctccttgctgaagacttacaattactcctacttccttttgtatctctttttttaatttaattttattaaaagaatttattgtgagaagaaaggatgtgattatagaatatcaatcaactgtgattatcaaattagcaacaaaaggataagaactgcattaaagcctagcttaacctttgaagaagttttaatattgatgtagatttaaaattgcatagatagccagaaaagaaagttgtgtagcttagaacatgaatcctattgagctcactaaattaatcaaacgtgcaccataaaaccaatgccttaagcagatagaaatttcagtgccatggtaacttggtaacatttaacacctgtttatcacagctttacaagaataattagtgccactgttccttaagcaatattgtcagttaaaaaatatctaaaccttagcatttaatattttaacagtcatagacataaaaagatgattactacaaatgcataaatttcagccaaaatcatctataccatgtaaatggtcaacaatttagtgcacccaagtgacccaacaaagaagatacataatggcataagaaacctttttcagaagacatggagaactaataacagtctgattctactcactcacttgaacttaccatctgattctgaagaataagatcagtataagcatctacaaccttcaggtatttgtcaaggctatcatacagagcaataacctaaagttgcagccaagttagagaacaaatgaaatacctgaaggaaatactgacagttgaaaacatgcttacaaatgaagtccatactaaatcgcacacattttttatagaggtaaaaattatcatatactcaaattgaccaggagtggagagcatagatgttggataaattaccaaaaaaaatatcttgatataaataagagggattactggtatgttaaaaattaaaatcggggagatttatgtataaacaagtcaaggtatatattatttataatatgctaaggggaagagtatatgattgtttagctttcaattaattacatagaaggctagaatcaaccctcaattatcaccttaccacgagaggaaacaacaaagaaaatacacaatttcccccaaggtgtagatggatgaagagatgaagatttaagaagaatatatgcaattgcaaagaacctaataatgtaactctgaaaggatgcaagatggactagaattttacaaatacctgaataactttatctaacacagcattgacaatatcaacagaggattttctttcgtacagcctgaatccaagcaatctgtaattcatatgctgtatcacaaaaaagaagaacattaaaaccgcaaatgggaaaaacttaaacgaagatgcctctataataaggtaaaatggtaaatactttataatgtgtacaagaagtatccagctatgatagaaattgcaaaagtatacctgatcaaaggaattatccttgctaaattcaatgagatgaaggatctgcacgacattagaactaactacttctatagggagttccttcagtaaatgatgaagaatgattgaaacactccccaaatccagttgattcttcatcaatccaaactctgataaaacttcattgacttgtctctttagcacagttagacatacttagatcagcataaaacataggatatagaggggagaaaagcagggaaaacattagcaaactgactttctttttcctactgtccagtttttgaaaagataacgacgacaataattcttcatgaagattaagatataagaattgagttttcattataataatgagaagaaccccaaccatttagctaattatatgtgcatacacctgtttcatgaaatttcaacctgcaattccactcccttgaaatgctcatggaaaattcaaaatagaagagcaaacatactaatcaataaaatttcaattatacacttttgtataacaagatatatggaaatatgatcatatataatacatccaaaacaagtatatttttgaagagaaacttcatcacatacctgagacaacccagtaaatatacacttcataatatactcaattgttggttccatcagactgacttgcaattttttgttgagtttaacatttttctgagttctttcattggctgacaagatttgcatcaaaacaactctgatgtcattgacacatgtaacaagatagcctgttccagttgcacaatttatgaaataagttttatgaaaataaacatgagaaagaagtatataacagcaatcggatatattaaattcagaatgagcaaagtcagtgacctttgcatcccatttcagaaaaggagcaagagaaaattaatcagaggcaactaagcactgctatagagcacaaaatttcatataggaaagagtatgaagcaataatctagattcattgattctgttttatctgaataactggtacaataatgtgttaaccagccgacttttcacattctaaacaacttttaaatttggaaatttatggaagaaatacaagaactttaaaccagagtatttgtgactgtactgacaccaaagagtatataatatttcacactaaggtcttggattacagttcataagggtgttagagcattatgataaacaattgcatatgtaaaggttagaccaaaatatatctaaatacatacagatcgtattttaacaattaaaaggggcccatctgcttcttgtttacatttttacacaccctaaggatagatatataatatcaacaaaaatacctatatcgtgtgaaggcagattctgagcacagtgagccatataaagacggcaatatgcagatgctactggatctcctaatcctcttatcatcattaccaagcgtcggaggctgtctaaaggttggtcaagcaaaaaccgccagcaaggcaatattgccagctccaagtaactagtacaatttcagataaacagtcagcaaataccagtcagtgagaaacaatctttagtgcaacagcttgtcaaaattcaaaatgttattgacaaaatctttcaaacttttctgaaaatatgtctatattgtagcaactttttcaagcaattttgacagaaaaaaaaaatgcttatcagttgtcacatcacattaaaatggcatcagaaagtctcgaaccaacacaagcagagagaagaaaaataacttcaggggaaaaaacatgtacggaataaattaaatacagggcataggataaggacttcacatgcgtggaagaagctcttgcacagcaccaattttgttgaaccagttatagcaagtttcttttgcatcagcacaaatatcccttgcttgaaagttttctacaagattcaaataaaacatttaagaaaaaagatgtgacttctaaaggaggtccatttatctcatgcagatcatcaagcttgtatgacatgtacaaattagttccaataaacaagatacaagatacaaaatgaaacatatttggtggcttctgatgtttgagatactgagaacctttttgcagttaaaacacagaatccttagtcttcaaaacattagcatgaaaaagatttaatgttgaaaaactattagcgccctcagacaagccacaagcttaacctgaataagtaatatttatataactacagattatggaagtaaacaacattttgtgatgagtttcaaattgacaaaggacctgctaagttgcagcgtaaagctccatcttcggaaaactcagctttccgctttatgcgttgccaaaccaggttcccaagcatatccatgatatctgtgacaagaacaaaaagtgtaggataaaactcgaatactgacgtatccatcagaagcttagcaacctgcaaacagaataatcagtttcagccctcataatcaatcaaaatcaagacaaacttagacaagaaatgaaaataaatcagtatgatttcactcccactccgaaactaagtataaaaatgagttatattttaaatgggtaggcccatctctctaagtccctagtattttaaaatcttgttaaacaaaattatacaacatttgtattctgtcatataaatattacgaagagtaaagaaagtacaggaggaaaagaaaatacaaaatggcatatccattttaaagggccgtcaatccctacactatctgataaaggggaaaatatattatcccagaaaaagggattatcccaggtctctcccacttttctgatgaagagcttcttcaatcagcccactcaatattccttcaacaatttactcgacaccctctcaaccccccaccttcacaattgtttccatctctctctccagctaaatggaataactaaaacaaaaatgtctcttttttcatttaaaaagccaaaaggtgattgcactcatacaaactataatgttgaaaagaaatcattaaatacataaaaattcacctttattgataactttaaggatgtcactcgatcttcagcaagccaggaacgagtaatttcatctttgagttcatgtagtcgagaaacatactcctgccaagtaatcgtcttgacaccctcatcagcaaatttttgtggatcgtccaattcctccaagtgcatatttgttgaagatttctcaagtactgaaaattgggaggtcacataactaagtaaagataaataaaggataaaacaaaaggaaaaacaatgtaaaagatattggcatacattttccacttctcattaaaacatcgggcatctgtaatttaaagaataaataattagataaatataataaaaactgaaagggttagagataaaggatcaaaactggtttaagaatataagggattatttacctatcttactttaagacctatcctctaccaatcaacattgcacaatagaaattacagatgtatattagtatatagtaattaactgctatatcttacacttcataagaatatttcaaagtttgtgaacttttttcaacagaaggttagctcatatgagcagtattatctggcgactagcatagggcccttaaaatgcaaaatcataaacaacaatgcccatacccaagcttgattcattatctttatagctgagaggtggaaaaaagaataatgaaggaacctaaggtgaaatatgagatgtattaataaatggttgaatatttagaaatatcttagtcaatatttatttttaagcacaacacgtattcacaactttcccaagtctgctcctgccagataatacacctcttccttaaaaatgtttaacgattgatatccgttaatgcagccgattaaaatatgttttaatcacatggaagccaataaaacagtatcagacagttctactgttttccaaacagaaaaatgtccagcctttccctagccagctaaaacaaagacacagaaagaatgaataacccttgcagaaggaggtaatgtccaaattcacactggttgaacttaacttgccagcagtatctaaattcacatctatgatctaacctgatctaccactactgacaattaagaatgttcaaagccaatctacagtgtcatcacaatgcatgcttccatcatatgcagcatactgtatttgcccttagccatcttagataccacaatatttttatttatttttatatgcagtatatctttaacatttacataaaccagaaaaagaaaatactgtaaaacttactgaagcaacagaaaccattttggagacaggaaacctctgcgttagtaatctcctgaaagaggtccactcctttgttggctgatgatcagcagcttcattcaagttgtcatgatcaggaggggcagcatttgcattattattagttcctcttagtggatcatagaaatcagtgttcccacgatctacgacatcgacctaaaacaaacatatcaacaaataaatgaatactgtcaaaagcgcaagatatgtaaaattttaccgttacaaatccacctaataaacacgaccacagttttttatatatattttcattaagcaagtcaacaaatattttcattacgcaagtcaacagaaattagtaagtcctaaattgtagttacttacgaaatccttcctggttcccgacctcccctcctttcctcagctcttagtgcactattgcagtgttacataaactactggcatgcaattcatgactatgattgtttgaataattatccagattacatcagattttacagaactaattacactcacattactcgtttcaacaatatcgaatcattagactatatcaaacaggataaaggtatctacacagggaaagatcgatagaatttaatttaactgaatgattaaaatcctaggcgttttcttatttcaggatgatagaactgaatcctaactctacgcaataaaataaaaaaaaaactgatatatttcgtggtgcatccgaaaccgtgaatgcaacaccgattctgcatagtcacaagcactgatcaagcaaggtagcgtaattgttttaaaagaagaaaaaacaattgcgagagaaattatgatacgagaaagacctgggagagaggtggaggtggaggtggagcagagagaggatgagctccggcgcgtaggcgagggagcgcgtgagattcaagctcggcactgtaatttcgatgtctgaactccatgaaagcattcagcaacgagagagggagagagagagggagggattcggggttttgtcttttgtttttttacagtgacttggacaaggaaaatgcaggatcagtgtgagaagaagctgactatcaaattaattattattatttttacaatttcatatttatatattaagatatataaatatcagtcaaaagaacttaaataatacaatttaaataacaaattacgaatttagggctatttcaaaattatttaccaacctgggcagttggtcacgcccaaaattgggcgaccgatttagtgacggaaaattcgattttttaaatttttttgtttgcgaccaaaataatttgtcggaaaaactgttagcgactgaaataaagatcaaaattggcgtgttttaatttttgacataaaatatcatttaatatcatttatttttatttttatttaatttgaaagtatttttagactcatcttcatcatagatatgatcttttttacttgtttttaatattgttttatttagtatatttttttaattttatatgactttatttaatatattctgaatttttggtatttataatttttagtatattattttatttaatataatttctaaattttatatgattttgtttaatattttttggattttgtatatataactaatatttaataaaatattttatttaataaaatttttcaaaatttttggattttggatttttcaatattttatttaatataatatttttggtatatataattttgtttattttggaattttaaaaaattgaaaatttttatttttgatacttctcattttttctaaatttttgtaaataattttttaatatagaaagcattttaaatagaatattatattttggtacttctcattttttatatcgagactaccccattaagcacattattctcatccctctcatcatctctttcattctctcataatttgataattctctttcaaaaaaagtagaagacaattctccttttctctttttgttccggtcaaaagcacaaagtcgactaacttgtcatcgaaattacaccgaaacttaggctttctgtcaatcggtgactcaattgtataaaattagtgtggtcaaaacatttacatccaagcgagaaagggaattagaaaggatcgtccatctttcatggtgaatgatcaattgtgcgagtaggttggtcaccatctttatctctctgggtaagcgcaatgcaattctttgcatttcaatttgattcacttttgtgtcacgtagttccactcctatttctagagttctgcaatgtttcgccgctccaagtgcgctttggaattaatggggtgctacaatttcgattattgtgtggtgagtgcactttgggatgagtggaacaagtggtaaagtgtggaatgagtgcggaaaagttaggaatgaatgtgctttgggataaatgaggttattatataaaaaatccaaaaaatattaaacaaaaccatataaaaatttagaatatcgaaaaaagttacaacggcgtacgatatgtccttcaaatggtctaacttttgatagaaatatccgatcgaggtgtacgatatgtcgaaatgctcgaaattaatagaagtaataaaaaaaaagcatgcaattaacttactgaataattaaaaaagcagaaaacaagaaaattttagatcttcgaagattaaatcacaattttgaggtacttagaggcctcttttgggaaaattttttgaccaagtcccctttgaaacttgccaggtgcttctcctctcaatttcgaacgcgtggctaccagtttcgcctcaatcggacatttcagtcaaaatttatgaccgtccgaagtttatatacgcatcgctgcatctgtgcatgacacgtgtcaggagtaggtcacgcccagaactgggcatgactggtcacgcccagcaccaggcgtgactatgcccagttctgggcgtcaccaactgccccagattggtaaatagttttgaaacagtcccaaattcgtaatttgttatttaaattgtattatttaggttcttttgccgaaaatattattagttgccgtttctgctggttgctgaaaaaattaattaaaatactttaaatgaaaatactttgtagattatgacaaaagtgacatctgttttccagattggcgacctaaatttaggtctctaaattacattccgatgattttaacaattttggtaattaataaatatttaaactgcttaataataataaaatacttatttattactatcaaaccaataagatatataatatttccataaaaatgtataataaagtgcaaattccatacttgtaaatagtataaaacacaatgtatgacaaaattgcatattcatattataataagaaaaaaaatcaagtgcacttatgaaattgataaaatgtataccaaaacataataaatgatagagtgcagattcataatattgaggtggtgtaatataagtttcatttgctcattttattgttgaatccatcactacatcttctcagttttctggtcataatttttgcataagttataccattggttcctcaagtgtcctctcctaatctcccttttgccatatatattagtctttttaccttttgtcacggtcatggtaaatttcatttacatattacccatctttctataaatatttatatagtaaaattgatgaaaaatggttcattaagaattgatggataatgtgttcactgggactaataatgggttacttctgtgtattgcaacacaaactttcgatggaagtatgaaacaaatgtgactgcgtcataaagtaatgaatataagaacgacaaactaagtaccaacaactttgttgtaattgctttggagaacttacgtaaaatagcaaaaagtgaagggaatttcctacaggtcacgtaagcataattttccaacttgtgtaaatttagtttatccttttttaaagcagaatacacgagttgtcgagctctcttccgaatggtggctaacacttttaggatctaaaggtagactcacttgtgacttattaaacgtgattcacgttaggtgaaaccctgtgttaccttactcgagtaatcccttgaagttagttgttacactctctttaccctttagtatataggcagagtctatgatttatatactttttatacataaggagaggaaatggtgtcttagttaagtatataatccaaaaaaacactaataaaaaacttacaattacttattaaagaatacgagtgagaagtcgaagatatatgacagcagtaagaaattccataattacattagtataatgccatgttggtagttttattctaaatttacagaagaaaaaaacagtagcgggcgtatgtttgtgtcagctgcgattgttctgagatcaaatgtatactatatatatatacacacacatggggattttgacatgttaccacttttaatagctattttattttttagatgcctgaataaaaagaaaatccgaaaaatttcaaagttcaaacaaagcatttctctaatccgggtcctgtagcacagctcttttcacattcccctaatattacctgtttatgcaaagtaattaattgtttttgttagaaactagaggtaatcatacttgagccggataatgaacaacaaagtctctatctaagcatttaactaactggacatacaggtctcaaattcaaaactacttaagctaaaataatttcgcaacaattgattcgcacagttagtaattaattagcacctttgttaaatttagcacactatttctcaaaaagaaagcgtgtgatcaacaaaaacgcacttgcggtctgaacgtgagtttgaagtttctaaattcttatcctctttgggaagtatgccagtactaatcaatccctttgagagactaataaagagcaaaagtgactctgcagcaacccagcaagtaaaaaacatgacgcaactagctgtactgtattaaacaccatccagaagaaagaaaaccccttcataagatctctctatgcatcacattttcccaacacaaagaaacacatgaagagacaacaaaaaaacatgccatcttcactcaccttaccattaaccattttgacagtactgtcttttctctccttcgcccttggccacgatgctcaaccctgcagtgaagcgttcctcaaactagcccaacaaaagaacatctcagcctgtaagacactgcgcactctgggggcagagtttgcttggtcctaccacagtctcaccaatgaatccatagaactagaaattatgttccgtgccacactccccaactcacaagggtggatggcgtggggtgtgaacccgggaaaaaggcctgagatgattggaaccaaagccatcatagccattaaacatggcgacggaacgtggaaagtagacacatacaacgtcaccaaagagaccagacacggttgcagccttcttccgtcgaaaatcgcgtttgtgaacaacaaatcagttgaaaaggtcgctaatatgaacaccatgtatgctacattggtccttccttctgatgtgtacaacgttacgaagctgaaccatgtgtggcaagttgggattgacattgacgatggacatcccctgaaacatccaacaactcttcggaatgtcgacagcacagaggtcatagacttgactgacaaaaacggtcgcagcactggacagtaccggagttatcttagatcggtacgcgagagctattttttttttattattctttgattaataatgcttaggtaaagatggtcatggtctttgactttcgacaaaggtatacctggttcaaaaaaaaatgatcatgaacatatgtcatcatttcaatagtaaatttaccaatcttacttgtctttgatccaaatcatattttattttattggtaaattaactttttggaagtgtttgtgtatggtaagtgttcattacacaaagagtggcaaaatggcatgactcaaactcggttaggccgaattcactcaataaaatgtagggagacctttaaattttgaatctgaattaaaatttatatcctttagtgtaattcgatcatgatctaatgtaggctaaaaaaaagtctggtgtttatcaaatttgaacctggttttagaagtttgaattgaatttggatcaacatgttaccattaactattcaaagattcactagtatttcaatgaaaattaggcatgtgaaactggtaaaattaaaaaaactttaaagatagctagatattttcaagaatattgaatttgttctgtttatagaagaatggcaaattcaacttcccacatgtctaactactaattaattaggtattagattgatatacatttttctttttctaattaatagaatcactctggtaaatatacctatacaatcgaggtgatcattgttacacaaataagaaataaacaacaggattagtctcatacgagaatgattaatttctttcctgtgtgttgaagaggcacatttaatttatacttatggttgtgcatgaaattaatctaggtacatggagtcctgaacattatcgggtggggaacactgttgccgattggaattataactgcaaggtactttcgggtgtttcctttcaaatgggagccaatgtggtttaacctgcacattggttgccaattaactggttttctcgttggcaccactggatgggctattgggttaagtctcggccattcttcaagatactacaccttccacactcatcgaaactatggcattctcattttcacccttagcacagtccaggtaattaattaattaatatttctttctttctatatatatatatatatatatatatatatatatcatgtacctttacaatatcaaatatcatcataaaaaattagctatttaattatctaataaagcgaatatagattatacagatatataaaggagattgtagatggatagtccgtttagggtacgtgtgggattaatatataaataggtctaaagggaattaaaatatttttttaaaattaattaatataagaagcatacttttaaatgatgatgaaaggtctatgttttaaaagagaaaatcataatagattaaaaaatacttttaaagaaaaaaaacactaaaaggaacctatttagatttaataattaattttttaaattatatatccctcaaaagcatgtgctttcacccttggttaagttgtagatccattccttagtaattaggtttagctctaaaatatttaattaatatatgctccacatatgttttaaaagtttaaaatatgtagttaatttttttgctttctaaaatgcatttagtataagaatttttattattattgaatattcgatagttctaccattatattaccaaaataatataagggctgaattatctgttaaaaaaattagtcacccactattaattttctaaccaacaattataatttatagtatttacgatttacatcgctaaatcctattcatatatagatttaacgggggaaaaaataaagaaactgatttaatttcattcttattaattgcattaattaatctctattaggatatacattgatgaaagatatgtgtttggttttcagatgttggcttttcgcttgaagccgaaggtgacggatgattaccggaaatattggaatatgtaccatcattttcttggttatggattgctggctatcatattcataaacatattcaaaggaattaccattttggaaggtggagatgcatggaagtggggatacattggaaatcttgctttgttgggtaccatcgcatttggtttggaggttttcacgtggattagcttcttcatgttgaagcacaagcagggaaacaaagccaagaacaaaccagagccagaagcaaaagcctaatatatatatatatgtgtgtatatatatatatatgtgtgtgtatgtgagtatctatgcatgagcattacagcacgcgtcgaatatattgcctcaataatgtgtttttttattttttttggatacaataataatatgattgcattttttgattgaaaaaataagtagacattgacttgtgcttgtgggatagtaatttattttcctttttaggttgtttcattattattatatcgaacaaagaagacgagttaagaatatataaatatatatatatatatatatatagatcgacctcttaatatatgtcattattaatatctttttatttatattaaaatcacttcttaatttatttatgttttttatctgttatttttattaatttcttctctattttataagaaatgatatatttattatgacatatttaattagtcttccaaataatttttaaataataaatttatttaatatttcaaaacagaaaaaaagtatttaataagaaaaaaaactagaaaatcagtatgaagatgttacattaaattataattaattaaaaaaatgtgttttgctatctccttgtttaagaaattatatcatttcttcgtaatgagtttgtgtgcgtgtacatattaaagttcgaacctagttacggctatcaccttatgtgtattatccaaatctttcaccactagtctttgtaacaagtgtatcacatatgatcttttgaaaaaaaaattatctctttcttttgataaacttacaataaggatgaacaaattcatatgtttagaatagatgtaaaatgaataagatgtatttagaaattagttattttaaaagaattcttcctaaatatataatacacatcacattctattttattttaaaattgaattaattttataagtttaaaaaaatttaaagttagaaatttctcaatagataatattgtttcatgatcaatatctaaccaaaggtcaactacattaccaatagaaaagatagtggtagttagtggaggacaaaataagttttggaatttattatcattctcccaaaaggatatcgataataatctcttaggtactgaaagtattaaaaaaaataccttttgagcactctacaaagtatttgaaattcgagaaaaaaatatcattcatataatatttatttttaaaggagttgcaaatggattcgttgatttctcaatcatggattggaactgctaagtccacattacagacaatattatatataattattactagaaaacaaatataaaagaatgttggaccatggaagttctccataataattgtgactcgttcccttaatcaatttagcttttaatataggatcattcaaaatatatattttattcataaaaattgaagataatataaaaaaaatttatgataaatcacggactctgtttaatcaaatgaactaaaccccttcacataaatcaaaatatttgaaggatctgttttatcatttgtcctaacaaatttaaattatcagctaatatctaaatgatcattgttgaaagataaatgaaggtaatttattaaaaattaaaatcttcatgtgactattaattaatttttaatcttaattatttaaggttatatggctcaaatttatatattttattcttaaatgtttacactaaatatttccccttcaacctttttcatttcataacatatttttttatatcattttttttcttattcatttttttaatttccttatctatccgtatcaatatttattttttcaattaacattaaatctttttatttcaaaattaaaaattttaaacatatatttaataatttattttatatttattactaataaaacaaccattctttactttttaatttatattttcacattttatgtatacttataaaaattaatattttattaattaaattcatgtttaaaatttatcaaaattacaaatttcaaacacatgtatttttattttttattatatttattattgataattatttcattaataaaacaattattcatttcctttttaagttatattttttccatatttgatgtatatttattaacatatttttttaataccatgtttttcatacatagatctatctaatttgttggtgactaattttatcgaaaaactatattgactacatttattgtgtctttatttcttatcaccttttattgtgtcatgcattaagaacctgtcttccagccgtgttaagagatgctacattcagtagttgccttcgtgtaagtgatattattagtataaaaatttggtttaatcaataagattgaagtgagttgattacgtgaattgaagattaacaatagggcattattcatggttttaggatgtttacatttttttatgttctgtacttcctcaagcatatacacgtccatctccgcaacactcactctcaccctgtctcacttcaactcactttttccaagtccggtccttccggatttttttttataaccaagtcaaattccttttagaattgcgtgtttgggtagataggtcagtagaccggtcacgacatcttgctcttattgaataggtgggacatatcattttgctctcattgaataggtgggacatgacatcttactcaagacattctaataatatgtactttaaagatgatattatcaaactaaccctgcatcaaaattaatcattccaaactcatagttagattaccttacctgtgataggtgttcaagtatagtataaggttatattatgtactcaactgaaaaatgagaagtgaggcaatgaaactcccaacaaacaacatcatccaaccaaaaactagtggcaggaactaacgaccacatagtcattgtcccatcttccacgtggatctattatcatgaacgatgcattccaattccttatcaccccaaaagtccataatttatggaaatcaaggtataattttcatcagcactaaaattgagcttcatgttagtggcaaacttatcggtggaaggcaccacatgagggagtttacgcaagccaatcttggcagcttcaagctttgcaagatccttttgagaagaagaggaggcaacaaacaccttagcaacacttgcatgtccttcccttgattgttttatatcaacatgcttccccttcttttggcacatctcatacaacatagtcactggttgaggctgtttctccaaagcatccggtgtcactattggctccaaaacacccctcattatctgccacaatcacaattattttcacaaaccattttttcatcatcttgaattatacagcaacttcaatgtaaaagtaaaagcttattctaaaaatcatttataatagttgtcattcattttcatcataatgaattgattcagcactgcaaatgaaattaaaaaccttgcctgataatcacttataatacttataattcgttatcatcgtaatgaattgattaccacaaaatatgtttcgatttatactaatttaagcatacgattttaaccaatttttgaatgtaatcctaaaaatactttatcatattatgcaatacaattttaaatatattttatattatgcaatacaatcttaaaaatattttatcctatttttgatacaatattaaaaaatattatatactatatttgaatacaatcttaaaaaatattttatgtaatcttaaagatttttattatattatcttatgtaatacaatctcaaaaatattttatcttttttaatataatattaaaaatattatattttattatatcatatgatataaccttttttattattaaattacttttttaatttttaatattataataaaatttatattaataaaattttaggggggcggtgcccaccctagcatgggcggacgcaggctatagattgggggacagtgccccccccttaaattctcaagaatatgtttaaaaatttttgggtaatttttttataataataaaataaagtaaaataaaaaaataacttagatgttttcacaaggagaaattgaaaagtatagaaaaaaaataataaaaaagatgaaaaataagagatgagtgagtgtgaatcggtatatttataattttcatgaatgcagtgaccacactcttgttatttttaagcaccagccacacactaattttttttctggatccgcccctgcaccctagcccccgccccccttatctccgcccctgtccgcaacactcactctcaccctgtctcacttcaactcatcgacaaacttttttccaagtccggtccttgcagatttctttttataaccaagtcaaattccttttagaagtgcgtgtttgggtaggtatgtaagtaggtgggacacgacatcttgctctcattgagtagtgggacacgacatcttgctctcattgaatataactacacaagacatctttttgtagcaaaggtattaaaataaaaaataatagaacaatctaaagaaaaaaaataataaaataatcaaggataacaagattaaaaattatcaataatatttttagaaagaatatttgtttgtcttaatcatttgatttattagaagaaaggaactctaattatttgaagatcgatgaaaagataaatagagtttgatcaagattttttttttcaaatatcaaactcagataatccaatcgaatcaaccttattaagtttgccattactgaaacatgattccagtattgtgatgatgggagcggggtgtgtggggattttggcggtggttctgagcgaggaaaaggccttggctttgggcccagaaggcccacttgtggaagagttctgggacaccaaacattggaagagtaaaaattactatcaaaagacaaaacatttttttataatcaattgatattttataaaattactttataaaactagcttgaacacaaaaaaaaataaattaaatgtatattaatatatatatatattttatttttttgactttgaatatattaatttataaattattgaataaagtatatttgacaaacaatattaatataacatttaatattatcagtataatattaatataaatatatgaataaatagatttttcatatattttatgacataaatttgatatttaattaatattctataaaaatatattttcaaaaaaagtcaaatgaataataataaaatattcagaaataggtatatatattatatataaataaatattaacggtcatatagcaaaataaatttatgaaatttcaaaaagtattaatataaattactttattataaaaaaattaaaaacattaaaatatatatatatatatatatatatatatatatatatatataatatacccgtacatacatgataacagtgcgtgtttgattaggtaggtcaccacatcttacttgtcacaagtaaaacaatttttgattgtttcttcatttttaattatttatcataattttttagactaaaatcaattttatttggaatccaaacatgcccaaaatggctcttgattataaaggcggataatctttatctatttaatgtagaaacaatgtacatttaagtaactttacaatgtagtttttattcttaaaacacgagtgacattatgacttttattatgtggttcactgttttaattacatgtgaagtcccagcttttattttgtggtcgatctattgctttatttacatgtgctttatcatttgacatgtgttccacctctgcaaggacctgccaagtcggagttaggacttaatcatcttaatcattggaaacttatctcaacataatttgaacgccttgcaataaattttataaaaatgatggcaaaattttcgtcttgaaaaaaaaaattgtttagttataaaaaaacatgaataaaattccttttaaaagaaatatctttggcttagtagggcaataacatataataaaaaataaatgaatatatgctgctggaaatctaaatacgcaattatttatataaaaataaatatgcttaattaatcaaacaaaccaataatagttcaatggctacataaaataagggatgtgcctttatgactctaagatacctgatagacaattataatctagttccaaaataagatatcttaacgagggcaaatcaagtagtggtaaactaagatattaatgtaaatttaaggtttcaaatatttagaacctaaataaagaagttgaagttgttcaaaatattacatggctactgaggccatgagagaacaagtatatatacatgaatcacacttaaaacaactaaacctcattcgacagggcatcttatccttctctatgttgcctggttcaatgcccaaaagttcaggtggattttttttcctttttttaaaattaatataaagaaactattctatgtatatatatgtcatacttttaagcaattgattgtgaaacatacataggaatgttcaagaattttcttgatcctccaattcactttagtaaccacattcatcctcagttaagtctatatgtttatcatgaattaatttggtcatgttccccctcctctaaactttggtcattaattaatttagctttagatatgcatgtgatatttttctaatggtatttgttttctcatatgtaggtcttaaactgttctaattaattattttattttcacttgtatatgtttgactcaaataagatgttcggtaaactcaaggattataaaaattagaggagacattcaacggcctcccaccatagacaaatccatgtttaaatagtaacacaaaaaaaaaaaaagattaaaacgaaatttaagttcatggtatctagataaagtttaggaatcaactaggataaaattaaaatttaatatgtctatttgtagaagctgagataaaatttaaggtgcccaaaaatactctttttcctaaaaatataataattaaaagagtacattagtattttttttaatgttagtatatttttaatgtaagggttagaattttaaaattctgactgcacagttaaatccaaaatattgaaaaaattaggaataattttttaatttattttatggaaataggacaaacaactatattaataatgattttttattctcacttgttaatattattattttaattaatttaaatattagaatttatatgttgtaaacaaagattaaaatttctagcctaggattaagaattttttaataaactttcaatatagtagtatgttataagtggatgactggatggttaatatatatgtagttcggatggtctccaactctcccgcatttcctgcataattttttttcatcaaaatctcaaccgaacatcaagtcatctctcatctctggttagtgtagattcttccattcaatgggttcatatgttgttaaatcgaaaaacagaagttttgttcattgtgcatgcagcaggctacaaatgatcagcatgctaaaaatatacacaagatcatccaatggattttgcttgcacacacaagacttgtctcttttgcttgcacacaagacgaatcttttgcagttacttaatttagactcatatgcttgcacacactttgagtaagaatggatatgagttcttcaattgtgctcgatctccattgttatatatattttaaataatgcatgatgaactcaattatcaattctattcttgtactccacacttcagaaaagaaaaagacaaatctttgatgtgagaattgtctttcttcatttatttcgatttagttttttgttgatatatctagttctgttattttattcagtttagcttgcagttttatatatgggctcctagcaccctttttctcaccaaaaagccatgatcgtacgtgattatcttatacattttattttctattatttcttcaaatactgccaacttgatgtgattgtggaccttagggatgcgaatggaaggtcgaaatctatatcttagttgtaagtttttaccttcatttattgtttagactttagaagataaggttaatctttactttggaatttagttttgtcatatatctgtcaatgtttttgagatgggaccatgaatgaatgaaactaatatgaaattttggttgtctttgaatatgcaagggagttgaagaatattggtgaaaataaaccatcaaatgccacacatatcaaacgaaagtgatatttcaagcttgaaggaacgaaagaacattttgcattttaattgatgataactactccatcatcatgtataattaatctttaaaaaacgtactgtatacaatttcactattaaaattgttttactctattaccaaaaagaatggtaaacaaacctaaacatttaaaaatcattgtcttaagaaatacacagttgaaaatatggattttcaaaattgagattggatttgggtgcatttgatgcatattaaaagaagaagaatagcacactataaggaaattaaatcacattacaacattttgttataatgttgtttggttccacacttccacttacaacacaaacaattttatatggattcgacaatgttccttgttttcaagaatttgtcaaaattgattggtattttttattagacttaaatatttttttttatctttgatatatattagtagttttatgttcccgtcattttcttgttttagtctttttcctcctcttttctcccttcttttattttagctttttttctctccctttttccttatttttgatttatcattggattcatctaccattgaccccaattaagttagattaaaggtgttgttgatgttgatgtatatgttccctgatatttgaacatttttattttagatctatgtcgttagttaagtaataacgtgcactttaaatatttgataagacgatttgtgatgaatcaaaaatcgtcagtatttgtttcaaaatcaaattaaaatttttttacagttaagaatcgtcataataattaaagtaaaaaataaataaatcaaacaacaataatttggtcctcaccattagcgtcgatgtcgacttccaccagtgcaacaataattacaacatggtgggaaccacacaaatctagatttggagcaacttttgtttgtcacagcggaggaaaatgacagggttgaaggggatcggtcatcgccgcgaccttgttgaagatctaccatgttgcaccacacgaatccagatctgccacaactttcatctgccgttgcgaaggatgatgaaggggttgaaggatgagtggtcattattgcttcgttgtcgaagttctgccatatcgtgccatgaatactaatgtggttcttaccccttcattggaatcaagccagcacgcaacacactattctatgaatctcaattttgtgcaaacaaggaacccttcttgaacacccaattgaagtcattgctagaattcttgactatcgaaattgaaagggcaagctgccattcgttcttcaaaccaattccatttgtaagagcatgaatcatttttattccaacacaatactcaaatcgtgcctccctcgatggttgtctcgatgggggaaggtgtgtacgggaatttgacacgggagatttggtacatgcgactgcggtggcagatgcccacgatggtgacaaagtgagggcccactacggatcgacatcaatggagacatagatgacacgagagtggttgaaggtggcagaggagaaggtggtcacgaaagaggagggagaaggaatgaaccttctcttttaaaaaaaattgagatctattttaaatttgatttttaaacaagtacgatgatttttgattcactacttatcaaatatttaataaacacattatcacttaatttacggtagggatctaaaacaaaacttttcaaatataaaggaaaaggaaaaaattatcaaggataaaaacatagttaaacatttttactatatgagagaaaaagttagccaataagttatcagttaaccaatatttgaattatcgtctaatacctcatctttagttttgtaatgcacaacctatgctcttttttgttttgttcttttaaggagaatacacactatatctcattcatccaggttatttaattttataattaaaaataattttaaatgtatttaaacaaatcaaaaccgttcaaattcaaattgttggaccattcaggttctctataataattatgactcattcccttagccaatttaactcttaatataggatcattcaaaatatactttttatttgtgaaaattgaaaacaatataaaaaatttactataactcacatactctatttaatcaaatgaactaaaccccttcacataaatcaaaacatttgaaggatctgttttatcatttgtcctaaccaatgtaaattatcagctaatatctaaatgatcaatgttaaaagataaatgaagataatttattaaaaattaaaatcatcatgtgactattaattaatttttaatcttaattatttgaggttatatgactcaaatttatatattttatttttaaatgtttacactaaatatgtccccttcaacctttttcatttcataacatatttttttattcattttttttaatttccttatctatccatatcaatatttattttttcaattaacattaaatgtttttatttcaaaattacaaattttaaacatatatttaataatttattttatatttattactaataaaacaaccattctttactttttaatttatattttcacattttatgtatacttatataaaatttaatattttattaattaagttcatgtttaaaatttttcaaaattaaaaatttcaaacatatgtattttttattatatttattattgataattatttcattaataaaacaattattcatttcctttttaagttatctttttccttatttgatgtatatttattaacatatttttttaataccatgttatttgtacatagaattaccgacttggtcagtgactaattttattgaaaacttgattgattagtgtatctttctttgttatcacttttattttttacattacaatatttgaattcaagacatgtttaagaggatgaaggcattgccccagtatcactaggaccaacaattgattgatatttattaacatatatattatgtcgtttcatgagtattgattaaaaatattaaataaaccttgtcaagtattttaaattattttaaaataaacattaaataattcttattggaaagattgacagtcaaagatgttaaaataaaataaatactccctcttaccagtaaactatttcataaggattaaaaatttgattttaatctatataataatgaaagcatctgcaatgaaaattgctttaaaaaaatattattttaatgtgtttaatgtgatattgaatgacttaaaattagagagttatttatacaagtaattattactcatgagttaactttataatagatataagagatataagtaaaatatttgttaattaaacaacttattaatataaatactattagagagaaaattaattgaattacttaagattgaagtaacataaattaagttacttagagaaattcataaagaataaaaaaatagactttttttattatcattgaagttgtattgaaaattaagagaagatatattgttaaatttctcaataaaaactttagaattttaatttcataagagaaggctaataaacattttccatataattaatagtgataaagttgaaagaattaggaggggcacgcacggtgatagaaacggggcgttttagtttgcatgcaaagcatatcatatcatgtgtcgcaggctccttccactacgcaccatttcgtcgcatgatagataatagtaatgaggaagtttgcattacaagaacaagaactaaaccccactcactcactcacacacacacacacacacacacacacacacacacacacacacatatatatatatatatatatataatactcattcaatgcacataataatacaatttcttagaatggcgaatttacccgaatccacctccacaagcggcgcgtcgtctggagctccttctgccaccggcaatgatcgcagcaggatggcgtatatggaaatcctcgttgtcgaactcagcaatccttttctccgagcaaactctctccatgagctctccaatgtagtacttaccttccgtcgtttttccactctcgtgcgtcgttttaatagtccaattaagtactgtataacaccccatttacaacgccccattattccatatactatatcacatgcgtcgtcgtttcaaggctcacacggttaatattttatatattttagatgagagacttatttgaggatcttgctccattattgtggaattcttttggtaccattgcagcaattttacaggtattattacttattccttttgtcactctttatctttcttgtctttttatatttttttatgaatgaatagccccataaatactgactaatattttgtttcttgaataccttgtttgtttcaaatcccagttttatgtatagtcttgaaaatttggttgtactttgacgcattttggtttgttttagaaacaatttcaaaccttaatagattttagatgatatattcattgttgagtagtgtaatttttttattataaaaagagagaattaaacatgctcctaatttatttatttttagttttttttttctcaatgaagaggtgcttctttgacctttgttgcccaccgctcactaggatttttttttcttccaggaaatagtttcagcatacccttttatttcacctccaggcctgactcaagcacactcaaatcgagtgtgcaaagctcttgttcttcttcaggtccactcacatatactttgtctggtctttctctccttttcttcaatgcgttcttactaacacatatcttttgctctcatggatatcttacagtgtgtggcatctcaccccgatataaggatggaattcctccatggtaatgatattttttcttattcacctgaaggaccgtgaacttctgtttggtaaataatattatttatgataaatagtatctttgaaaatttggtcttcaactgagtcaaacggcattgcatgattcatgtatttttgtggttgatgttgttcccaaactttgcttttgtacggtatatgttcaatacatataaaatgattgttgatatcttatcatctcctagatatattttccctttttttctcactaataaattttcttttgcatttatttaaaattgttataagatattgtaaaagcaaccaattgcaaacaatttaaaagtaagaaataatttgttaaactataaaatttcataaaagatgattaaaattgttataagttttcttttgcatttatttctctcctatttcttttaccattcttttcttttatcttattttcttttttttttttattttattttctctttttcttctccttctccttttttttttttttttaactttcttgtatttatcattaagttcatttattatcaacctccaattaatttggattaaatgtaatggtcaaaagaccatacatacataatctaaaatgttttctgcctataaaacagaatcatgcagtcaatttttatatgcaacttgctctctctctatcttatcataagacttctactttatcttacttgaaaatgaagtttctctctctttcaatttataggtcataccacttgttcttctttcttagcattcagtcatacttatattttttttactgccaatatactttcataagcatccatggacagaaacttttgggcaattgaaaggcatattagttgttcttttgttaatataaaattaaggagattgctttgacattaccatatccgtttcagcagggtttttgctcattgaaactaacactttaaggaaaaagatatgactctttcactctttacacttacctttttctcatctgcagctcgtatacctctatatatgtatcccttgcttaatacaaccagtatggccaatccatttgagaatatgaggcttaccagtcttggagtcattggtgccttagtgaaggtactacgtccttgctgattctgttattgaatacactagactatgagaagaataattttttatacaacatttatgctgaacagagaataatttcaattagtaaattattgtcacaataaaccttgccataaaaaactaaatactacaataacctcaactaatatgtcatttaaaaaacagtaataactgattattgattattataaatctgtggcacacaggtaaatgtgtaaatattttagttgccacaaataattagtcttgttataatcttataatgttcatgtagattttcaactatttgttaagtttcaaattcattcctgtaataattttctatgatgtaacaggtacatacaactcaagttgttcggattagttcatcgctagtatcagggaacaaaattttccgaactattttatgcccttcaagatattgttgattttttttcctagtgggatgaagctattggtttttttttttggttgcttgtcacatgtacatttatacttgaattttgtcatgtgtttaatttcctttctgttgatatttcaccagtttcataatacagcagctataagtttccttctttcaacagtttcttccgctttgcctgcatagtatgcaaataggcggtgaattgtcaaaaactgtaagtttactgatcttgttttaaaccaatttggttcgataaaatattttatttggatgaattaaacttgatttttatttgcttcatttttctgagttacattttttgggtatgtatgatgaacatgtatgcatgtgaagcatgttccaatacaatgctacataggaggtgtaaggcaattagcataccatttatctgatcaatgagattacaactgaggaaagtggtcttggcataagataaatggatactatgtgaacttggggagggatatcatttaagaactctcttttttttcatcttttgaaatgttggtcttaatataagtttttttagtggttatcacaggactgttgaaactcttcttgacatatttggttgtagaagagtgctagcaatactccttttaacattctattattggttgaaatttgttgaaaatcacaaactttggtaagttccacttttaaattaggacagagactcatcaaacgagaagtaagaaccactattataattttcaataaatttaaactaataaaaaataaaaagaattttaagagtgttgcaaacactcctcttggttgtatcaaaatgcaactcaacaccagtatttgtagttacatgggttgaaataccccgtccttgatacttgagatctaaatctttaaataacacgtctgtttaactcttgcgttgtacttcttgtggtgcattgtaaatgctaagccatgtgtttgtttttgccactatctcgtgatcatctttttatgcctatcaaaataattgtaatgggaaaatttgtgtgtaatctaatggaagttccaccaactgcatgttggaacctttatagttgaacaaattctgtcggttgaaaatggtatgaaacatatttgtacttcagcagggcgcctttttcaagtatatatagttttcggaacgatggtggtaactcttgttcagcaaccttcgtgtagtcttttgaaggtcattattcgttgttatcttcgtctgtcagaaaatcagaggtttgttaagtagatagtaactccagttttataagggcaaaaaaatttaaataatgcgatttaattaaaaaattacgaaaatatggcgttttgaaatgtaattgcaaatctactgcgttcaaacacgtctggacaaaacgtgttaaaacacgtcgagctgagacgtgttaaaacacgtcctgggaggacgtaaatgaggctggaacacgtcctggctgggcgtgactttgccctagacacgtcctgcatggatatcgtcgtgtcggggtccaccaatgagtctacctgtgcgacgtatcttcagctctctctgtgtgtcctcattccacactgcctgtgaaatgtgagtgcgttgcctccgccttcgaagtacatcccatctatatggaccgggaagaacatgcgttgtgggatcgataggctcatgctcccggtcagagccagaacgaggtgactcagatgacgatgactcagccataataatatgctacacattttataattatattataatataaaccctaattttaaatacaaattatttaattcactaactatcaaattatttttacaaatttattatgtatctaggtcactatctgataatctacttcgtaatctaggtcactctctaataatctaactcaccaacgataaaaaggtctatttttgttctggtcacaagtgtttcaatatgctatataccttattgtcatcacaattagtcatctcatcaatattaactatgtatgtcaacaattttcattaaaaaaaaaatataaaatacaagctcatttgtacaataactttaaattatgattttgcaaagaaaatgaaatatgactctacatgcttttttatttagagtttaacgttgatgattattaatgtaaaaaattacaatgttattataaacaattattttaaaaaaattaatataacttttaaaatagttattataaaaagccaataagattatcctagaggatggtttttgattggataataatataagatgatttacattgttagttcacaactttttttcttttattttatagaattaaatatttaaattttaaattaactattttaaataatatatggtatttaatgcatatttaatttcttattaggaagttatgaattaaaatttgaatacaattttattctttatataatcatagaattggtggagtgatataaatacttattatgttcacatataaaaaattcatttattttaacaaaacaattgtatttaatttttttctaaaattttattgaattaatactaattaattaattctataatttgttttcaaattgctacaattttgtaatcttttttaaattgtaattcattaatttttttcccaactaacaattaacctaggtcacccactaaataactattttaaaaatctacatcactaactaaaccctaacaactaacaagtaacctaggtcacccacttgtatcctaaaccatagaaaatatttacctaaaccatagacctaggtcctaatctaggtcactatctaatactctaagtcactaaataacaatttaagtaacaaactaataacaaacaattaacctagctcacaaactaactaactatttaacaatctaagtcactaattaaaccttaacaactaactatttaacaatctaagtcactacttaaaccctaacaactaactaacctagtaagcatttaagtcactaactaataatcaagtaactcaaaagaaataaaaatattttactactactaacttgatttatatagagcttcttgcttccttgcttgcaccctatttgcaccttccttgcactttccttgcttccttgcttcaaatgagagaaaaaaatttgagagaaagagagtttagagaggcagtggcaagtgtggctggggtgtgggtgtataaaaagggggagctgaaacacgtccctggggagcgcgaatggggactgatcacgtcgctgcagggcgtaaatggagctgatacacgtccctctaggacgtgaatggagctggaacacgtctccccacgacgtgatgcagtgcaagttgcatccctgcaggacgtgattgaacgctgaatacgtctgccattgacgtaactcaacacgtctcaggtgcccgtgaatgctttctgatcacgtccacccatgacgtgattcaacacgttcagctcaagcgcgaatggaagcagtagatgcgtaatttgatttcaaaatgcattattttcgtaatttcttattaaaatagcattatttaaatttttttgccattttataagtgcttctgcagttctgcccatgtcctttacgttcttcccaagtttctaataaaactttggtcatttcaaaacagagtttgtcatgcattaagaacctgtcttccagccgtgttaagagatgctacattcagtagttgccttcgtgtaagtgatattattagtataaaaatttgatttaatcaataagattgaagtgagttgattacgtgaattgaagattaacaatagggcattatttatggttttaggatgtttacatttttttatggttttggttttatttattcaggaacacccaacagctaggagatggctacagcagttgcttcataatattagagtcaatccgtttcctgcacaacaaggtggaggaggattcgatcatatgacggggtcgtgagaacaagactttctggggtttctacatatataaaataggattttcagttgggcatgtatagagagaatgaagaattgaatgggaagggaactatctttccgtttgatgttaagagtgaagtatacatgagctgatgagcatagtcacctcttaattgaatgcaaatattaaaatcataatgagccatatatttcaaaaataaaaaacttctcttcatctatatgggtaaaggagattgttagagattaaatataatatgagagtaaaataattattcatttttttcttttaaataatagaatgtaaatttagttccatgctattataatatatgcaaccaatagactggaaattttattccattatattccactttatctcattctatttctttttcatcaatccaaacaagtccaaaactcaccaagataagagtaaggaaccaattcgataattcagttgaccaatagaagaatctcctcaatcaaaacccattgatacctcgttgatcaaatcagacctaaacacacaatataaaacatccaagaacatacacaccgccaatcatgaactaaatgtgtcagggagagagaaaaaaagaaagaaaaaaaaaaggaactcatctcatggtggtggtcagcgacaaagatggcaaatttgcaactaatgcccaaagcattggatattgacgtggaagataagggggaagcgttaatcgaactggtttgaggaactcctcttttttctcaaaaggatcttgcaaagcttgaaactgccaagattggcttgcgtaaactttactgctgatgaaaattggtttgtgaaaataattgtgattgtgaggggtgttttggaggcaatagtgacaccggatgctttggagaaacagcctcaaccagtgactatgttgtatgagatgtgccaaaagaaggcttattctaaaaatcatttataatagttgtcattcattttcatcataatgaattgattcagcattgcaaatgaaattaaaaaccttgcctgataatcacttataatacttatcattcgttatcctatttttgatacaatattaaaaaatattatatactatatttgaatgcaatcttaaaaaatattttatcttattatgtaatgtaattttaaagatttctattatattatgtaatgcagtttcaaaaatattttatcctattttttaatgtaatattaaaaaatattatatcctattatattatgtaatatattcttttttattattaaattacttttttaatttttaatatatataataaaatttatattaataaaatttgggggtggcccatcctaacccccctatctcctcccctttccgcaaaagtcactctcaccctgtctcacttcattccaagtccggtccttcagattttcttttataaccaagtcaaattccttttagaagtgcgtgtttggacgacatcttgctctcattgagtaggtgggtcacgacatcttgctctcattgagtaggtgggtcacgactttttttttttatacaataataatatgattgaattttttaattgaaaaaatgaagtagacattcacttgtacttgtgggatagtaatttattttccttttaggttgtttcattattatatcgaacaaagaagacgagttaagaatatatatatatatatatatatatatatataaagaccacttaatatatgtccttattaatatctttttatttatattaaaattacttcttaatttatttatgttttttatctgttatttttattaattttttcactcttttataagaaatgatacttttaattagtcttccaaatattttataaataataaatttatataatatttaaaaatagaaaaaatatttaataaaaaaaactagaaaatcagtatgaagatgttacatgaaattataattaatttaaaaaaatgtgttttgctatctccttgtttaagaaattatatcatttcttcgtaataagtttttgtgcgtgtatcatattaaagttcgaacctagttacgactatgaccttatgtgtattatccaaatctgtcaccactagtctttgtaacaagtgtatcacatgatcttttgaaagaaattatttctttcttttgataaacttacaataagaaaatatataatttaaaaatttagaacaaattcatatgtttagaatagatctaaaatgaaatagatgtatttggaaattagttgttttaaaagaattctccttaaatatacaatacacatcacattctatttttattttaaaattgaatcaattttgtaagtttaaaaaatacagggatttctcaatgggtaatgttatttcaatacttaaccaaagaacaactacattaccaatagaaaagatagtcgtcattactatagtggtgactgaaggacataatgaattttggaatttattaacattatctaaaaaggatatcgttaataatcttataggtatggaaactattaaaagaacaccttattaagcactctacaaagcatttgaagtatgagaaagaaatattattcagataatatttctaaggagttgcaaatggatcaatgagttccccaatcatggatggttctaaaacggctaagttaatgacaatactatctatagttattaaatataaaatattgttggaccatgcatgttctccataatgattatgactcatttccttagtcaatttagctcttaatataagatcattcaaaatatactttttattcgtgaaaattgataagtataaaaaaaatttacgataactcaaagactctatttaatcaaatgaactaaacccctacacataaatcaataaaacatttgaaagatttgttttatcatttgtcctaacaaatgtaaatcatcagctaatatctaaatgatcattgttaaaagataaataaagataatttattaaaaattaaaatcatcatgtgactattaattaatttttaatcttaattatttaacgttatatgactcaaatttatatattttattcttaaatgtttacactaaatatttccccttcaacctttttcatttcataacatattttttatatcattttttttattcatttttttttaatttccttatctatccgtatcaatatttattttttcaattaacattaaatatttttatttcaaaattacaaattttaaacatatatttaataatttattttatatttatcattaataaaacaacaattctttactttttaatttacattttcacattttatgtatacttatataaaaattaatatttattaattaaactcatgtttaaattcatcaaaattaaaaatttcaaacacatgtattttttattttttattatatttattattgataattatttcattaataaaacaattatccatttcttttttaaaaatttgattttaatctatataataatgagagcatctataatgagagttacttaaaaaaattaaatattattttagtgtttctaatgtgatattgaattaatttaaattagagagttatttatataagtaattatcattcacgagttacttaactttatagtaaatataggacatataagtaaaatatttgtgagttagacaacttattaatataaaaactattagagagaaaattaattgaattacataagattgaagtaatataaattaagttacttacaaaaattcataaagaataaaaaatagaaatttttaatcattgaaattgtattgaaaactagtatttgacctgcgcttacgcacgggttaattatatattattatgcacattatcgcgttaaacagtttaagattgatcgaaaaggtaaagaaaaatataaaagcaatttatatagatagtattatccatacaacttatggacataattaaatagtgcaagataaagcagataagtttaagagacagtggctacaaactgagacaacttctaactgaaccatgtagtttctattaacatgcatatttaaaagctgacaggtaagagctgttttttgcaatcaatacatccaccagtgtactatgttgctacttgggtatgaaatctccataataaactcgaagtcagcttttaaattgttggctcgtgcaaaagctttccaaccagctcctattttagcactctttctctggtggttaaacataatcttgcatgttattcttccttcaaaacagaccgttgtgaaacctgtatccttaaggtagtaatacgcacgggttaattatacatttaaatgcatattatcgcattatgtaaaattggagatgaaaaaagaaaatataataagattcattaatgtgaaatataatatgcaaacattgtaacataagtttataatgttaattacaaaaaatatgaacatcaaatagaggtagttaaggaacacaaaaaacaaaattagaatttttgatttggttgactatatattttaaatgcgtgtaatgtaaatattcattagtaaaaatcatatataataagattcgataatattaaatataatgtactgaaatgttgatagatatagttaacaaaaataaaaaataaagctagagttcaactttggttgagttgaattagaaaagttacaatgaaccaataatccaatgcacaatgttgtttgttagatatgaaaactccatgataaattattttaaattaactttaattgtccaataacaaataattaaactattattttttaataatatattaattaaatattattatgtggttattgtaacaaataaattaaatacaaagagtttaaaaatttcaaatattgattaaatttaaataataacactataaatattttttttaaaatgtcaccacttaaatttactgttatttatccattatttatatgatgaaaatttaaaaataaataatatatttaataaaaataaatattgttgattgtttgatatgtaattatgaaataatgatgaaatctattgattggttaaaaaatatgaaataacagaatgacatattcaaaatgaaagttatttacaaaataaaaaaaaatcaattatattaattataaaacctgtaattattatgttagaaaagaaattgtccttaatgtcagtcttgatgtaaaaaaccatagtttcatgcatttaattcactttacaatcaatcaccttatccagaaagaactgaaagtagacaattgaaagaagacttccaagtgcaggaatgctagtggtcaggatcaaatttatggcattaacatacctgcaagaaaatagtacagttaaactaatgaactttgtctggaatgataatcatttgctaaattttattaaggaattcaactttgattgatcacaaacacactcaagaataccccaagggacatgtgtcattgcagccatttccatgtcaaatttagtttccaggccatggactaaggtcactaatgatgttgttataatgaccgagaattcatcctgtataattgcatagttctgttagaatgggagctgtatcaataagaaaaaaaaatcatttattgagaaggcattgatacctgcacttcagacatatccaccccatctgaatattgagggtcaattattttagaaacattttcaaaaagttgaccattttttgtcccaagaatgacttcctttgtggaaactgtatttaaaaagtttattcaaaacatcaagcagaaaagaaaatgtgaaagtcttatagctcagtccaattgaagaaaactgtacctaatcaaactgacccagaactttaatcgcgatcgaggctgagaaaatgagacgaaatgtggcgctgacacgtagcatccgaagctaagatttattgtgagcctgtcagctggattccgaagctgagaatgcaccaaaagttgacacgtacccagcaaaatgttcttttattactgtaatgtaaaaccaaaagaataaaccaccacaactggagcataccttcatcatcaccaaataaactgtgtttaagcttctcctcagcagttcataatcatgacagcattgcgcattgttgaaattttaaaaaataaaagacagatttatatgtaattataccattcaaacaatatgtggcacacgcatatgattccttcaaactcttgggagtacaaccacattacgtattaatgctaattgctaaactccaacagattactatataaaataaggaaagtcacacctagtaataaaagtttctgaatatgctttcagcctttgtttctaactggattcttctttcaatttctgcatcctgcaaatgcacgactcaagtttatgaatttttttttgattaaattgaataacacacctgtttcaaagaaaagcgtgaataagaatagagaaaccagacatgatttttcattcatgccaagcataccattgttccaatcctttaaatgcatttcgtcctaaagtaatcggtatcccaccaaacaattgcacaacttgcacatgagtgtatcaaaataatttgtattctctgatggcccaaaagagcaatgttttatttcttgatactgtataataaaatgtatgtgtcagtgaatgaaatatttttttaaaaattaagaaatggtgcgaagtacttcaaattagtccaaactcaacgaataatttgtttcattaaagccactgggaaggaagcgagtagattacttaccttttggtatacaacaaaaaaattgttaaattcatcaaatatgcgatctttgatttcactgctctgagtatcagcaaatattgaaactgcttgctttggagggttaaacacactctctgccactatactttgtattgcagaagcctgtaataaaataaggccctatcatgaacatcatgcaatcaacaaaaagctcatttaacataccacaaagcaaatattcaaacaattcatttagcccaacagggaaaccactgaaaaccaatcaaagaaaacctattaacatttctaatttgagatgcatcaattttttttgcaatgaacacgttcattacacaaagttccactcaacacagacataaggaccaatcctgacacaaaggcctgattacagcaccagctcaccagctttatgaatgcaagaaagaaaaactaaaagccattatttttctattttgagctaccttgccaggtgaaggttcgtgtccattccagaaaacataagtctgaatcacatccaaacctccgtccttggccttttgaataagatctgcccacatctgagaaacaaagaaaccccacaagttactaatgcaaaaaggaagaaacttttaaggcacccaatatatctatatatatataacaacaaagctaccgcatcatcaattcaaatctcaaaaaagagccacacaatatacctagcttacttccaaattccaacaaacattaataaacctggcagaaaggaaaaaaaatataaaatactactacgcacactgaatgaaatcgagtaatagcatctttagtgaaaaggggacacaacacacatacaaagaatataaaaaaaatggaacaaaaaatcacagcaaagcagaaaccacaattaaccacaactactaatgtaaaagcaaattacagattcctattccatgacaaaaaaaattagtgaaaatctttgtcaatagatccaaccaataagcatgggaaggaaataattgatgctgatattctgcgatgggcaaacagcaaagtcatcagtttgggaagtcaaagccgaatggatagtttcaaggtgttttgaatgtatataaaaaaaaatcatacaagtatctgctgcaaaggactgactatcatgttctttggtttacttttccctgatcttgttcattattaattattatttcttagaaatactaatattttgtttgtaatattagtaagatttttattagttttatgcctattccttgctgaatacagagctactgtacttatgtatgaaaaaaacaatcattaggggtcatactccctactcatctttacaaaataagtcttaaacatatatgcatgtctaacttggaatccacccagtagtcaggggaacaaaaaatgtgtcattttctcatcactcaattgaaagaagaaaaaaaaggtggaaagtttgagagagggaataccattcactggtatccagctggagccatagccgacggaagtaaagaccctattttttccaccttactctaccaacacaacattattgttccctcttcttaattctaaaaaaagaaaaaggaaaaggaaaaggaaaaggcagaaagcaaaaggtagaaatgaaccttgtggtctcttcttcagcagccatggctctcctcgttttccacagtagcacctggtggtagtgctctcccttgccaccaccctcaattccatctgaaaaaaaaaaccccacataacaaaagcgaagtgaaacgcaaagaaagagaagaaagagaacacactgttgtgtgagatgaaaatttatgtccggcaaggttaatcttctccttcatgaaaaccttagtgtcaaaatcgagcagcgcaacgcagggcccttgaacaccgacggtgcatcggtgaagctttagggttttccaaacgaactgttgttttaggtgagtgaaaatggatgatagagacaagagagtaactgagaaacgaaccgtgtgaaggaagaatagtaggtgaggattaaccagaaatgtcagcatttgagacgtgggagagagaaattgtctgattgatgaaggaaaaagagttggaggatgaagaagaaatttgaaatcttggagcgcggttcggatttgctgaaggttgctcgttgaactaaacaaagctgagggtgcgcatgtccctacagaggtttggaattggctgagaaaatgagacgaaatgtggcgctgacatgtggcatccgaagctaagatttattgtgaacctgccagctggattccgaagctgagaatgcaccaaaagttgacacgtactcagaaaaatgttcttttattactgtatagattatgaaaggatattgtactgcacaaaattagtaaaattattatgcattgtacacgtgtccattaccatattataataaatatacacgtgtccatcaccttgttatagtaaatgtacatgtgtccacggaactggacgttaacactcaacaatgtgtctctcttatcaacaacaacttatttgttgctataaccactctacacacttggaccatcagagtttggaaccaagttgaattcgtctattcaaatttccaggttttggtaagaataaatatattgttaaatttttcaataaaaactttagacttttaatttcataagagaaggctaataaacattttccatataattaataatgataaagttgaaagaattaggaaggacacgcacggtgatagaaacgagcgttttagtttgcatgcaaagcatatcatatcatgtgtcgcaggctccttccactacgcaccatttcgttgcatgatagataatagtaattaggaagttggcattacaagaacaagaacaagaactaaaccccactcactcacacacacacacacacacacacacacatatatatatatatatatataacactcaatgcacataataatacaatttcttagagagtgaatgacgaatttacccgaatccgcctccacaagcgacgcgtcgtctggagctccttctgccaccggcgaggatcgcagcaggatggcgaatgtggaaaacctcgttgtcgaactcagcaatccttctctccgagcaaactctctccatgagctctccaaggtagtacttaccttccgtcgtttttccgctctcattcgtcgttttaatagtccaattaagtactgtataacaccccatttacaacgccccattattccatatgctatatcacatgcgtcgtcgtttcaaggctcacacggttaatattttatatattttagatgcgagacttatttgaggatcttgctccattattgtcgaaatcttttggtaccattgcagcacttttactggtattattacatattccttttgtcactcctagctttcttttgctttttttattctttcttgtcttttatatttttttattaatgaatagccccataaataatattttgtttcttgaataccttgtttgtttcaaatcctagagttttatgtatagtcttgaaaatttggttgtactttgatgcatttttgtttgtttcaaaaacaattttcaaaacttaatagattttagatgatatattcattgttgagtaatgtaattttttattataaaaagagagaattaaacatgctcctaatttgtttatttttagttttttttttctcaatgaagaggtgcttctttgacctttgttgcccaccactcactaggatttgtttcttctttctaggaaatagtttcagtatactctgttatttcagctccaaacatgactcaagcacaatcaactcgagtgtgcaaagctcttgctcttcttcaggtgagaattgatatgtccttgtcctatcaagttttatatcgtgtgttcaacatatttcaatttgccccaaatattattttttaactctaaaaatcaattggtttgaaaatgagtccagtccatggttctaaattgcagtagccatcgccgggcatgtaaaatagaatagaagattgaaatctaaatctttttattttttatttttttgggtaaataatcattttcgttcttaaatatgtagagtgctgataaattcattcccgtaaaatgaaaattcaaatttttgttcctgaaagtgaacaaaatgtgacaaatctatccattttattctcccttttctaattattgtaagcataaaattataataaacacttaaaaattaggaaaacaagtataagttaaaataaacataataataaatgtaatattgattgataagcataatttgtatgttgatctaaaatttatattctaacaacattagataatgacaaaataaagttgagtttcatttttttgtaaggattaatttaatgattgtattttaatttgtttgagtctcatattttaggtaaggtattatctcatatttttgctttgaaatttctaatgtgacagtaatttatccaaaatataagaccaaacaaaaatgcatagtaattaatttaattcttaccaaaaagatgagacctaacttgattttgtcattatttaatgttattataatagatattttagagtaacaaataaattatgtttattatacttattattatgtctgttttaacttatgcttattttcctaatttttaaatgtttattgtaatgttatgtttgctgattaaaaaagagagaatatgaagattaaattatattttgggtaaagagctgataaatttgtccctgaatatgtagtgcgttaacaatttggtccatgaatattaacgataatatatgaaaattaatggagagataaatttgttatatttttttcactttcataaacaaaaatttgaattttcatttttcaggaatggatttgtgatttttttttttttaaaaaaaaaaaagtggaatagaacggtgctaaggttccgttgctgctccaatatggttctgttgtggctaggtggcagcagatgcgttgcggaattttgtgtgattgaaattcacactgcaggttgcggacaacactgcaacaacaatattccgggtgcaatttagaaccatggtccagtcacatatactttgtcggatctttttctccttttcttcaatgcattcttactaacacatatcttttgcatggatttttttacagtgtgtggcatctcaccttgatacaaggatgatattcctccatggtaatgatattttttcttattcatctgaagaccgtgaacttctgtttgctaaataatattatttatgataaatagtatctttgaaaataattgttgatatcttatcatctcctaattatattttcaataaatataaaatgattgttgatatcttatcatctcctaactatattttccttttttttatctcactaataatttttcttttgcatttatttaaaattgttataaaatattgtaagagcaaccaattgctaacaattaaaaagtaagaaataatttgttaaactataaaatttcatgaaagatggttaaaatttttataaattttcttttgcattcatttctctcattcttctttcaccctttttctttctcttttccttcctttttttttcaattttttcgtatttatcattgaatttatctaccatcgactccaattaacttgaattaaaggtgttgttgatgttgatgattaaaagaccatacataatctaaaaagttttctgcatataaaacagaatcatgcagacaaattttatatgcaacttgctctctctctatcttatcataggacttctactttatcttactagaaaatgaagtttctccctttcaatttataggtcataccacttgttcttctttcttagcattcagtcatacttatattttttttttactgtcaatatactttcataagcatccatggaaagaaacttttgggcaattgaaaggcatattagttgttcttttgttaatataaaattaaggagattgctttgacattaccatatccgtttcagcatggtttttgctcattgaaactaacacttaaaggaaaaagatattactctgttcactctttacacttaccttcttgtcatctgcagctcatatacctctatatctgtatcccttccttaatacaaccagtgaggccaagccatttgagtatttgaggcttaccggtcttggagtcatcggtaccttagtgaaggtgctacatccttgctgattctgttattgaatacactagactatgagaagaataattttttatacatcatttatgctgaacagagaataatttcaattagtaaattattgtcacaataaaccttgccataaaatactaaatactggaataacctcaactaatatgtcatttaaaaaacagtaataactgattattgattattataaatctatggcacacaggtagatgtgtaaatattttagttgccacaaataattagtcttgttataatcttataatgttcatgtagattttcaactatttgttaagtttcaaattgattcctgtaataattttctatgatgtaacaggtacatacaaatcaacttgttaggattagttcatcgctagtatcagggaacaaaattttccgaactattttatgcccttcaagatattgttgatttttttttcctagtgggatgaagctattgttttttttttttttttgttgcttgtcacatgtacatttatacttgagttttgtcatgtgtttaatttcctttctgttgatatttcaccaggttgataatacagcagctataagtttccttatttcaacagagattcttccgctgtgcctgcgcagtatggagataggcggtgaattgtcaaaaactgtaagtttactaatcttgttttaaaccaatttggttcgataaaatattttatttggatgaattaaacttgatttttatttgcttcatttttctgagctacttttttttgggtatgtatgatgaacatgtatgcatgtgaagcatgttccaatacaatgctacataggaggtgtaaggcaattagcataccatttatctgatcaatgagattaccactgaggagagtggtcttggcataagataaatggatactatgtgaacttggggagggatgtcatttaagaactctctttttttcatcttttgaactgttggtcttaatataagttttttattttacggattacgagaaagacaaaatcgatattacactgtacatactgaatatattagaaaaatggctggtgtagaaaattaatcccttctttgaattggtgggagtagatggaagaatgggattaagatccattgtttgtattgaaaaataaacaatggaatagactaggaaagtcatggaacccattccatccaatcctatcatttttagccgttttccttcctcaccaaattggggtgtatgcaatgaaacggtaaatatttttctctctcaacgtcatgattataatggttttgctccacgttgtggcttgtcctcaaattcatgacaggtatatttttcagtattttatttcgctgcgttcttattcttccttccattcctctccaacttgccgcgcacacactcaactaccaaatatcatggaaattacgtagatttaatatgaaaatttgataccttggcatgggttgcaagcaatcaaagaataaagatgatgttgagagagtgattgagcaactccagtaaacacaggaaataaagataaatagatgagattatgaagaatggacgtttttttttttttttttcaaaaataaaaaacttctcttcatctatgggtaaaggagattgttagagattaaagataatatgagagtaaaataattattcatttttttcttccaaataatagaatgaaaattttgttccattctattataatatatgcaaccaatagactggaaattttattccattatattccactttatctcattctatttctcttcatcaatccaaacaagtccaaaactcaccaagataagagtgaagaaccaattcgatcattcagttgaccaatagaagaatctcctcaatcaaaacccattgaaacctccttgatcaaatcacaactaaacacacaatataaaacatccaagaacatacacacagccaatcatgaactaaaaatgagaaaatagattgaggttttaggatcttaggtaccaatgagtggtccagattcactctccatctaaacataaatttgagtctttagattttaaataattaaagaataggaagctctacttgatcagaaagcaatacatgggaaaagtcaacccttcacaaattgacagatgtcacaagaaggttgaaaagttgatttcatatggatcggaaaaaattgtcaaagaaaaaaaaaccttgatttcatatgccaagctgctgcgctatggtctaaacaatagccaatcacaacagaagatggaagacaccctaaaattacaacagaattctcttctacatataattagattgctgtaaggcctgaatcatcaaggaagcagcagagttttctgcatccttcacccgagatttttcatcccctgacatttgaagaataccatcagcagttggaatctgaactgcgcagacaaatttcttttcatgagagggacctgaatccttttcaatgctgtgagccattgaagagatgcaacaagttagtcaacaaggaatgttaaaagtttcactcacgcatgcaactgaactgaaagaaaatcatgttaaagaacagtacatgtactctggtataggccattttttaaccgcacaaatctcacgaagtttatttttgggtgcttcaacaaccaaggtaccattttcatcagcagtaaagttgagattcatgttagtggcagacttcttaacggtggaaggcaccaaatgtgcgagtttatgcaaggcaatcttggcagcttcaagctttgcatgatccttttgagaagaggaagcagaggcaacaaactctccaccaacaaacaccttagcaacacttacatctccttcccttgactgttttatatcaacctgcttccccttcttttggcacatctcatacaacatagtcactggttgaggctgtttctccaaagcatccggtgtcactattggctccaaaacacccctcattatctgccacaatcacaattattatcacaaatcaaattttcatcatcttgaatcgtacagcaacttcaatgtaaaagtaaaagcttattctaaaaatcatttataataggtgtcatcataatgaattggttaccacaaataacaatcacaattctttttgtcttagaatatgagtttggacctaatttaatcccaaaaactagctcatagggtgaggattattccccacttatatagtctatcttggtaaaatctctagctaggacttgggttttccccaatacaagccgcccagcatttttgggcttgaatgtgagtttggatccaattcaaccccaaaaattatgagggtcgttctcgacttatatagtctatcttggcactatctctaacccacgtgtgaattggatttttcccaatattttgtctagaccacaagtatcttctatcggaatgcaatcaaaatttaaaaccttatcaaataatcaaataataatttacattcattcatcgagagcacaagcacgcaacttaaaaccttatctgatttgttataaacgtgataacgaggagatataagaatagcttggcggtgaaagaaaaagggagggcggaaggaaagaaaaactaacatacaactaacataaaggtgatgatgaattgataaaaggtacggtaccatccatagtttctgaaggtcgaaattgacgtctacgtaaaccgcggcggcgacggactcgacgacgtcggcgaggaccttgggggccttgacggaaccgccgtgagagacggggtgattctcgagcttgacggcgtcgacgaagcgctcgacctggtcgacgaggggaggggcgctgtggcggacgtagcggtggaggccggtgcggacggcgacgcgggcgagcttctcggtgctgatgttggcggcgcggaggagggagagttggccggggtcgagatgagggtaagcgagaaacaagtggttgctgatggcgagactgagaacggggtctccgacgaactcaagacgctcgtaggagacagcgtccacgaaggaggagtgagtcagggcttcttctagaatcttcctgtttcgaaatccgtaccttaggatattctctacttcctccagcaaacacacctccatctccgcaccacaaccaaacaaaaacaacacaacactcactctcaccacactctctcacttcaactcaccaacaaggttttttataagtccttccagattttttttttatttttataattttaaaagtgtgacgaaagataaaaatatgaatttaatttttgaatatataaaaaaatatgataaattagtctcttaaatttataagattatttttttattaaattttaatatttaagaattaattttattataaattatatttttaaattaatttgatattaaattataatatttaaaaattgatttagtgtcacattatttataaaattaattttttatattttttatatttatgaattttaaatttaaatttttatcttttaaaaatcaatgtcatacatttttataggcgaattttaatatttatcatttttttaattacctgaatatattttgattttttttctaaaatcagacacgacataattgcagcagtaaaaattactataaaaagacgaaatatttttttataatcaattgatattttataaaattacttcataaaactagcttaaacacaaaaaaaattaaatgtatattaatatatatatatatatatatattgactttgaatataataatttataaattattgaataaagtatatttgacaaacaatattgttataacatttgatattatcagtataatattaatataaatatataaataaatagatttttcatatattttatgacataaatttgatatttaattaatattctataaaaatatgtttttcaaaaaaagtcaaatggataataatacaatattcagaaataggtatatatatatatatatattataaataaatattaacggtcatatagtaaaataattttatgaaatttcaaaaagtattgatataaattactttattataaaaataaaatttaaaaacattcaaaaaatataatatacccgtacatacacaataacaaatctagtcatgtcaatgcgtgtttgggtaggtacggtcaccacatcttacttatttttccattgtcacaactcacaagcaaagcaattttggattttttcttcatttttaattattcaccataatttttgggactaaaatcaattttatttggaatccaaacatgcacacaatggctcttgagtataaaggcggataatctttatctatttaatgtagaaacaatgtacatttaaggaactttacaatgtagtttttattcttaaaacgcgagtgacattatgacttttattttgtggtccactgctttaattacatgtgaattcccagcttttattttgtggtcgatctattgctttatttacatgtgcttaatcatttgacatgtgttccacctctgcaaagacctgccaagtcggagttaggacttaatcattggaaacttatctcaacataatttggacgacttacaataaacgtttataaaaatggtggcaaaattttcgtcttttaaagaaaaaaaattgtttagttataaaaaacatgaatacaattccttttaaaagaaatatctgtggcttagtagggcaataacatataataaaaaataaatgaatatatgccgctggaaatctaaataccttataggcaattatttatataaaaataaatatgcttaattaatcaaataaaccaatagttcaatggctacataaaataagggatgtgcctctatgactctaagatacctgatagacaattataatcaagttccaaaataagatatcttaacgagagcaaatcaagtagaggtaaactaagatattaatgtaaatttaaggtttcaaatatttagaacctaaataaagaagttgaagttgttcaaaatattacatggcttctaaggccatgagagaacaagtatatatacatgaatcatacttaaaacaactaaacctcattcgacagggcatcttatctttctctatggttgcctggttcaatgcccaaaaattcaggtatgaggtggattttttttccttttcttaaaattaattaatataaagaaactattctatgtatatgtcatattttaagcaattgattgtgaaacatacataggaatgttcaagaactttcttgatcctccaattcactttagtaaccacaatcatcctcagttaagtccatatgttaatcattaattaatttgatcatgttccccctcctctaaactttggtcattaacttagctttagatatgtgatatttctctaatggtatttgttttctcatttgtaggtcttaaattgttctgataatattaattattttattttcactttgactcaaataagatgttcggtaaactcaaggattataaaaattagaagagacattcaaaggcctccaaccatacacaaatccatgtttaaatagtaacacaaaaaaagaagattaaaacgaaatttaagttcatggtatcttgataaagtttaggaatcaactaggctaaaattaaaatttaatatgtctatttgtagaagagataaaatttaaggtgcctaaatactctttttcctaaaaatatagtaattgaaagagtacattagtatttttttaatgttagtatttttttaatgtaataagggttagaattttaaaattctgactgcacagttaaatccaaaatattgaaaaaattaggaatagttttttaatttattttttaaaacaaatgtattaataatgattttttattctcaattgttaatatcattattttaattaatttaaatattagaatttatatgttgtaaaaaaattaaaatttctagcctaggattatgaattttttaataaactttcaatatagtagtatgttataagtggatggttaatatatatgtagttcggatggtctcccactcccgcatttcctgcacaatttttttccatccaaaatctcaaccgaacatcaagtcatctctcatctctggttagtgtagattcttccattcaatggttcatatgttgttaaatcgaaaaacagaagttttgttcattgtgcagcaggctacaaatgatctgcatgctaaaaatatacacaagatcattcaatggattttgcttgcacacacaagacttgtctcttttgcttgcacacaagtcgaatcttttgcagttacttaatttagactcatgcttgcaaacacattgagtaagaatggatatgagttcttagattgtgctcggtctccattgttatatatattttagataatgcatgatgaacctcaattatcaattctattcttgtactccacaattcagaaaagaaaaagacaaatctttgatgtgagaattgtcttttttcatttatttcaatttagttttttgtccatatatctagttctgttattttattcagtttagcttgcagttttatatacgggctcctaacaccctttttgcaccaaaaagctgtgatcgtacgtgattatcttatacatttgattttctattatttcttcaaatactgccaacttgatgtgagtgtggacctcagggatgcgaatggaaggtcgaaatctaaatcttagttgtaagtttttaccttcatttattgtttagactttagaagataaggttaatctttactttggaatttagttttgtcatatctgccaatgtttttgagatgggaccatgaatgaatgaaattaatatgaaattttggttttctttgaagatgcaagggagttgaagaatattggtgaaaataaaccatcaaatgccacacatcaaacggaaatggtatttctagctcgaaggaacgaaagaatatttgcattttaattgatgaggatgacttcatcattatctataattaatctttaaaaaacgtactctatgcaatctcactattgaaattgttttattctattaccaaaaaaaatggtaaacaaatctaaacatttaaatcgggcaaaaaattacaaataatacaattaaataaaaaattttggcaaatggtgtaatttggaaacaatttagaaaactggtgcaaccaaacacgcccaaatggggcgtatttgaggaggtggtgacacgtggcagcaaaaaaaaaggggcgcgatgttttcgtaaacttcggaaggtcataacttttgactgggacgtccgattgatgcgaaaccggtggccacgcgctcgaaattgagagaaaaagcccttaacaagttccgaagaagactttcccaaaaaaatttcccaaaagaggtctctaagtgcctcaaatttgcgatttaatcttcggagccctaaaaaaaattttgttctctgatattttatctattcaattagtgaattgcaagctattctttatttatctaattacttctcttaatttcgagcattttgacataaaatacgtctcaattggacattgttacgagaaattacaactgttcaaagttatatgcatcgtcaattttacagtataattttggaaaacttttgcatttgggtgaatttgattcatattattaaaagaagacgaatagcacactataagaaaattaaatcacattacaacattttgttatgatgttgtttggttccccacttccacttacaacacaaacaattttataggtcgagcattggttcgacaatgttctttattttcaggagtttgtcaaaattgatgggtatttttcattaggtttaaacatatttttttatctatgatatacatccgaattttgtgtttgatcattgacaaatttttctttcgcatttgctccatggtatttgaaaagttttgttttggatttatgccgtcagttaagtgatgacgtatccattaaatatttgataacgcgatttgtgacggatcaaaaatcactagtatttatttcaaaatcaaatataaattttatgacaattaagaatcaccataataattaaagtaaaaaataaataaatcaaacaacaataatttggtcctcaccattggcgtcggtgccgaaccacttccaccattgcaacaacaataacatggtggcaaccacacaaatctagatctagagcaacttttgtctgttgtagtggaggacaatgacagggttgaagggggatcggtcattatcatggccttgtcgaagatctaccatgttgcaccacacgaatccatatctaccgcaactttcgtctgtcattgtgaaggatgatgaaggagttgaaggatgagtggtcattgttgcgtcgttgtcggagtttcgtcgtgtcgtgccatgaatacagatttggttcttaccccttcattggcatcaagccagcgtgcaacacaccattctatgaatcccaattctgctgcaaacaaggaaccccttcttgaacacccaattgaagtcattgccagaattcatgactgtccaaattgaaagggcaagttgccattcgttcttcaaaacaattccatttgtgagagcatgaatcatttttattccaacacaatgttcagaccgcgtatcccttgatggttcttggtggaggaaggtgagtgcgggaatctaacactggagatttgggacatgcgactatagtggcagaagcccacggtggtgacggagtgagggcccattacggatcgacgtcggtggagacacataggacacaagagtggttgaaggtggcagcgcagaggaggaggtggtcacggaagaggtgggagaaggaaaggacattctttttataacaaattgagatttatttatttttacttcaaaaaatttgagatatgttttaaatgtgattttgaaagaaacactgatgatgatttttgagccgtcacaaatcgtgttgtcaaatatttaatgaacatattatcatttaattgactgtagagatctaaaacaaaactttttaaatatcaaaaaataaatgtaaaggacaaatttattgggcatcaaacataaaatttaaatatatatcaaagatcaaaaatatatttaaacatttttatgtaaaagaaaaagttgtcccataaattatcagttaacaaatatttgaattatcgtctaatacttcatctttagttttgtaacgcacaacctatgttcttttttgttttgttcttttaaggagaatacagactatatctcattcatccaagttatttaattttataattaaaaatagttttaaatgtatttaaacaaatcagaaccgttcaaattcaaattattgcagcatgcagtagttcgtatttggaccataggcaatcaaattccaattccctattattacacaaataaaaattaaataataaataaaatcaaacttatttccatatccctattattaagataaaacataaaatctaaaagataacgtcttacagaaaaaaagagattctcaagcaacattccaaggtaaattgaccccacaggaaataccaaaatataatgtctacgcaatgcctttatttttagagagctagataaagagacaaaattttgtattcttattagttgtcaaagatttctgtaaaataaaaaaaaaaaaaaaaagttgtgaaatattacaacttattatttgctttaaaattaaggggcaaagaaacttacaacctagtaaggttttggttgtcaccaacctcaatgaaatgacatgtgcatctgtgcacactaatataattttactattgtaatttggtttttctttttgtcaaaaaataaagtagagtattaaaatgttgaatttctaaatttaatgtttttctggattactaatagtgtaaaaatatctccacactccgctgagtgttgtatttgtcaacctcttaattaagctgcatattaataccgccgcagtaagatattgaaatttagtgctattctaatactgctgcagtgccagtcattggacaaatttggctgtctattctttgattctttgcacacacaaaaaagaagagataatgtgttaatagatatattcttatttatctaaaaggccgcgtctaaggtaaccaactaactatttcagaagagatggtaaacctagattcctttgattgatatatataagaagttttatgcaacaagatgatacacaacacgtccactgtgtctctaacatctagtatattttaaatttatgtctcactatcatataaataatgatatgggtctttaccaacattgtgttggtcttgagtttaaactttataataaatagataaaatatgatcacgagagaatattttattaacaaaaattaattattaattactaatattgataaatattttatagtacaatataataaaaaaataatagagatctcataacatgtttacctcatgtgaaatagacaggggtctataaacctatctaacaattaatgttcttgatgttaagaaaaatatttgtgctttttcggacgacaattggacacagctagtaaatgcataggatgagtgcattgccattagcatttagcaaccttaaatattaacaaaaatcgtgcaaataaaaatgcttttctcattgtgccaattttttattttcttttgtaaaattcttaaggggacagaaacatgataccccaaattagattaagaccctgtccactgtttagtttgagcaacgggtattaacaactgttggatcatatatttttctgtatatatattgttgataagatggattagacagaatcatgacagatgtataatcaaaataaggcttgatctttgtcaaattgaacactcgtcgtctttctttctttttttatatgcagctggcactatcaaacattacctggcacttattttgggcatgaagtaacactttaagaattctgcactgttttgaaaaaaattcgtccaattacatagaaaaatatccaacatgctgtttttaataagatatcccataagctggtcacgtcatcagttatcacatgacttgagaaaaacggaaaccgactcaaatagagctaaagaattaatattcttatgtattttttatttttactagttgactctaatagatcaattttgtgcttaattaactaaaagctagtctattttgacatgttaaaagtaagtagttgcattcaactcataaatggttagtgagaatacgtttccaagaactctttaaaactagtaatttataattgattttactaaccatgagtaatggttaaactaatataattctttattaaaaattacaaaaataatatattaataatattaaaaaaattctacttttgattccttaagcataatactataaacaattattaataaaactgataattactagttaactacttaattatagtttgtgcaaaccattgctattaagaggctaaagtagacttaaagtttgatgagttaaacagcatcaaagtttgattagttatacaaaaatttggttaggagtgcaagatgcatgaattgatatcacataatctgcatactgcatcttgtactttataaaacacgatagatatgaagcatacatcataatcatatacgcagaccccagtcaattattgatagtcatgcagaaatccagttacaatataattacatatgtcatgtcttaccaacagtgaactccaattacttttccagcctcccccggtcttattctcttcagtcgtctcccattaatttaagcaggaaaaaaaaaacaccacagtttattttcaatagaaaatgctatgttttaatgacatgcaactttttaattgttggagcatgaaaatagatgcagtaaaattcttttaacaggaacttagaagatgataatacagattgaaattagtaaacagacctgacctctaattccaaattagaatctgtacaaacccagtgggttaaaaactaatagaccctcagaaccagtgtttctaaatttaacaccctggaaataatttattaaagagagaaaaagctaatgcgttcctaaaaggcttcctgataaagccaagaattctctctctgcatctttaactggttgtagaagttcccaatgaaggcctcagcttttgcaaacagctcttgcccattaactcccccaacctcatcttcagcttcaatctcctcatccatgacttctccttcactttctccacctcctatgagcaaaagatttggcattgaaggacactttttcacctcagtgacaccaacaatcttctcatcagaagcaggcttttcaacaaccttaggcttcttttcatcatattctgaggcacccacttccaccctttcctcaggttcatacacttctgggggcattacaggtttctgggtgacagaaacatgttgctttttgtcttctaaaggcttagaaaaaactgagagaagaccagcttcagctccaagtgcaatgatgagaacgttaaagatgaagtaaaggtaggttggtctcagagaggaaggtaacaagggtgtgatcccaaggagaagagcaaggacaaagagcactagaagttcagatttgttgaatttgttcatgacttcggtgaatgcgagtgaggaagttaaagtggccaagaggcaagaatgaaataaatgataaaaaaaagatggacagaataaatgaataattaggggtagcaggaagtaatacgtaggaataagtgtatggggttctggacatataaatagaggtgagggagagaaagacaaacagtggaagcagtcacttgcatcagtgtatgagttgttgccagtgtcagtcaacaaaacaacaaaaatatttgtgggggctgaaaattccaacaaaactctcatacattatagtcaataaaaacatcattaggcaatatatatatatatatatatatatatatatatatatatatatatattacagtgcaatattattttagtggagagaacacagttattttttaatccattatttaaaagattaatcctacttgtgaaatgagacatatatattattctttaaatacgaatatagtgaaatttttataccattatgatgcaatatttgttaaatgtggtgtaataccctttaattataattattctttcttctttatttaaacgaataacataatcaagtaataatggatcagtttaattaaatttatttattaaaataagtatttattttaataaaaaaattattttaaatggataacataaacaagtaataatgaataagtttgtttgagcttatttattgaaataagttttattttaataaaatagatatcattctgtttttttgtgtatttatttaaataaaatttaattttctgtttattttaaaaaatcgtatctatttcttaaaaaaacatattttaaaattgttttttaatttaaataaattcactcaatattttgtctttcgttgataaaagtagttcgattctacattgtccaccaataatgatgttaatgaaatatttaatccaattcggatggaaattaaagccagatagatctagtttagtgatttactacttgcaaaccaattgcatgatgttgtgaactgttaaaagcgttatcaatgtcggcacatgaaagttacacaacacaaccacttggagcattttctttttcctatctttactctgtcgtgtagttgattatgtattttatccgaatgaccacattaggaacaaaatattaagttgagctttggcacaaaactgtgacaagatgagattatagcctaggagttaaacttgttacacagtgattagacgagaaacaaaacaaaaacaagggacaaagggaaccatacaagagagaaattaatttggacgttatttggatgttgcgtgataaggcctgtgaaagcatattcgtccaataaggttttcacttttttttgtgggcgttgatatgattttaagggaagaaggtaacctctctttgaactcttcttggtcctgttcttaaaagccgtcggagtggtgggtcccacggttctgatcctatgtgattccaccccagagaactgttaattaaagggtaggattaggacattttgattttggaccccctaataatcatggaaaagcccaactttcctctttttgttatggactgactaaaatttgggccatttttacacgtaagaagcccaaaagttaaatcccgattaaccctatttaaccaaggattttagaaatgaaagggtagaccaaggatattatgaacagtgttgtatgcacattaaccagagtcatttattcttaagccagctgaagtgtctaaagtttattaactaatgagactttttgtgtgtacaataatgataatgaaacttgtaatacaccctataagagagacatggacaagctaaaaaatgagaaaaggattgagcatgttatcaagaaaaaaatggaaagactttcatttgagaaggagaacatataatgtgaaaaagactcgcatactttcatatgaagattgttagagtgacaagtgtgagtatatttattggtcaatataaattgacatgttgaataacatataacatgaaaaggatccaccaatttaatgttttaagcttttgacttagatgtaatgttaagtttacttgaactatttgttcatactcattaatgaaagtctgccagtgttttaccttttcatgttccataacactatatatgtagttgaatccataattgaagtatcaaaattgtgcataattccgtgtatgtttcatttagcttttggcatttgggattcacgtccaacttgaagcatctaaatgttatttatgcgtccataacataaattccagaagcattaagttttgcctttgaggattattgatatacactctaaaaaccccgttgtggccttgttcaatcataggcatcctattgaaaccgttggttggctcttgcaaagtgaaaagtctaaagttctgccctttttcttctcttcgtacatgtctttgaagtctttcggcttgttataaagggaactgttggttagcttttataagtctttttgtatacagggagaaaattttgataaaagataacgtgcttgctccttgctggtcaccccaataataataaaaaattctttggaaagagaatgatgaggatatgagtgaagcaagtatctttcaaaggttatcgttttcagaatttaggttctaaaaggaatttaatttctaatgaaagaaaacgttttaattagcagttcgtaaataataatgtaaaaattgaaacattttttttaatagaagcaagattaaatagagttcgaattagcacgacattttttaaaagaatattcctatttaataagtggtattgacgatattaggatctccctaagcattcaaatgtttgaataaaattctatggcccgcataaattttgattttcttttcgtttcagctgaatcgtagaattttaatactcaaatccatcggttgtttggctttttatttagaaaatgagttatcacctttacgtagaagaagaaaaaaaaccaattttcctacaattcctgcgacagtggtggtcaatgtcaatgccaaatgacgatagcgagatgctaacagtgatctagcctcgacaactgtgataaggaacgcatataagaatgtggcaatattaatcatcatagttattggaaaatgtcataacaatgactttaaaattataaaagcaacaatggtaaattttaattttaacttttcaacatttaacaccatagttattattggtaaaaaaaaacaccatagttataaaatttcatgttcagaattaaaatatatctaatataaattagtaatattaattatgacatttcccttataatcaatatatataatactaattttgattttttttctaattttattttgtaatatttttagtttattgtttcattttatttttattaacttttcatttattttatgtacatttttttaatccttataattattttaaaaaaataacaaagaggattatagtaatttttacataatatttttttattataaatacatattatatagacaaaagtaatatatatatatataagtatatatacaaatataatagtcattaatataattttttttacttataatgttaataacctcacaagttttaataaaattaaaataacatttacttaacttaatttttatatatttctttgatattcattttttatttataagcataatattaacataaggtgagtctaattcttgccaaagccaataaaaataaataattatttaatttaattctaccttttgtatgcttcattggtactaaacttgaggtttgtttaagctaatcttattaacaaaagaaacaagaatatcttatcaatacttaacatttttttaaatagagatctcttgagtagtatagtgatatagttttttatttaatttttttgaaggaaaaaaactactcatttgatccatataattacacaaactttatcttttagtttgtgtacaagcacttttggattatttttagtccctacctttaaaaaataataaggccattaaaaggtaaattttgtataaccgtaaaagtaggaactaaaaaagatataaaagtgcttatatatacaaggactaaaagtgaggatttttaagtgtgaaatctagaagataaaatttgtacaagtataaggactaaataagtagttttttcccttaattatttaatggagggtaaattattttatatagtaaaataataaaatttaaatgagataaatcaaataactaaaagttgtcatttttttaatgttattttgcattgacaatatatgaaaattaaagtcatatcattattaataatttgtatataattaataatataaaaatagcattacattttttctttcgagcagtatatcgtacgaccatgaaatctagttgtaatttcaatgtattcaccagataagatgattaaaattcgaatgtaacaactatggtttgaatactcaattccaaagttggatgtctcacgaagtgtaccttaatattaattgcaagttaagaaaagtggactcgttaaggttaagcctccaaacagagggcagtgtctgtctttgtcttggtccctatgagtctgggagcggacaaaaaagagtgtttcttagtcttaagaaataagaatgatcccttcatagatgcctaatcttgcacgttatttttctgccttcttctgtactccctccctagtccccccacatcattcattcaaatccacatcacactagggaaataaaataggagacaattttatgagttaatttatttataatatataatgaactaatatattttatagattttattttcacaaacacttactattttaagctagtatatatgtagaagtctaatgttttgtttagtgaaggagatgaaaaaaaatattaatttaaattaaaatagagtataaaaaatttgaaattcacactatttgaaattgtctatttccctcttactaaatggaggctgagagatgatatgttaggtagtctataaacatcaacaatgcatctacaataagaagagtcgtgttatgggagagtgtgatccacataacattaagtatcgttttacatacaaggctcgtgcatgggggatacttgagtgagtcaagattggaatatgaggctagctagtaatcgacccaagttgtgatctaggattttgccattgttggcaaacacgaaagttgagacatatagcagggctaaattcaatatggtcaaacgtgaattatattcaaattataatgtaaatttatgaattaaagcttcaaaaggaaaaaaaaaaaaaagattgatggaaaatattattttctaataagacccaaaaaaagacattaagtaaaatttatttctgaatgtgttagacaaggcatgttaaatgggtcaagaggcttaacattgcaattcaacctaccaaaataaatgggttgactattttcactcaatggataagtttgttttaccatccctactaacacttttaaaaaaggttggacatttctccatatttaatgttatatcatattcaagtaatcttattaatataataaagatatgagaagttataaagagttataagtttattaatataataaggatatgagaagttataaagagttataagtttatcaatttttttttttaaaatacatttgtccttaattgttattagtggtaccaatgaactgaatcaactcaaaaataatttgaaattcgagttgataatcagttcgttaaacttgattcataaattaaatgagttgaacttgagttacgtataattttacccgtttggtttatgaattgactccacacatgcacatacacacacacacatatatatatatatatatatatatatatattaaatttttataattaaatgaattttctattattttatgtatgcatgatgaaatagttttatttatattaattttggttgtaattatgattttttattgttatatcttatagttctataaaactagaatacattcaatttttttctttaaaaaaataaacaattattttatttaaaatctactaataatttaaaattttaaaacgtataggatttaaaaatttggactattattcatattattcgaactaacgagcttaatcgagttattcacgagtttaaactaaatcgagttcgagctaataaaaactcaagtcgagtttcgaactaaattaaatattaatgggttgagttaaactcaagtgagctcaactcatttttttcccataattgttatttatgtattggtattgctatttatataaaataaaactttgtgtattagagcttgatatctcatatcccatctacccaagatagtagagtattgttgagaattgagaaatatggtaaatcattcttattagataagattaaaagatattctactatcaaaagaaaaacatgaaaatattttaataaactaggtcttgtgatttcttctttacatatacattgagaaaactttttaccttctgctcgtacacttatttgacttccatttcatgtctgttttaatttaacatcataaataggagaattaatttggtctattattaattttcaacacccaaacgtcctctcacgtgagtgtatagctttgtgcttttcagtggtgcacacatgcatcatgtggagacatgggttgaggattggaggattgtgtttgtgggctcagagaggaccagcagaaattaattaaaagagatattttggtggccattcaattcaccctcgaagtttcatggactggaattttctgtttgttggtagagatagagaaatttcagagcttcttcccatacgcattttaggttgccacaaattcgtcatcaaaattcaatatagacaagatatgtatatatacacagcaagacttcttcaagtccacaaaatgttataatttttatatacaaaactaatttatattcgtgcgtgagagaagatttacgtgtatttattttaacgcgtcattcttttcttctttctcaagttaaacgtatgtttttggattggttgaaaaaggttttgatggagactctagtacagaactatgtaaaaattatgaacaactttttctatttactggtggtatttatcaatttgatttaagtgattatttaaaaaaaatcatttcttaatcttagaattaatttatgctaattctcatattcaaatggatatatggccaggaaaattaataaaagttcaagaaaaacacaaatgaacgataactgaagtttgtgaaatatttgggataacattaaagtttgaaatgtttatttacgaaaaacataaaaataaaagcataaaaaatcgttgaaagtaatttataaacaaagttagagggggaaaaacctaacaaagtcaacatgatcgttgtgagcttgagggaacttcacgtacacggtaaatcatattaaccatttttatattagggtaaatagatattttgtcccttaatatataaagtgttataaattcatatctaaaaatgaaaattcaaatttaaattttagttatcaaaaataaaaaaatgtcacaaattcattcatctgttaacacgttaatgaaagagtctatgtggcatattcagagacaaattaatgggtgaattttgttagctctttacacattcaaagacgaaaatgactacttacccaaaatataatttaatttttatttttccctctttaattgttacaagcataatattacaataaatacttaaaaaaatagaaaaacaagtataaattagaacaaacatattaataagcatagtttatctattattataaaatttctaatataatagtaccttacacaaaatatgaaattcaaaaaaaaattatgataatgagacctaacttgtttttgttattacctgtcataataaaaatttctgagacagattatatttattaattaatattatgtttattattatgtttgttctaatatatgttttctttcctattttttaagtgtttattgtaatgttatgtttgcgacgattgaaaaaaaagaaagataaagattaaattatattttaaataaataatcattttcgttcctgaatatgtaaagtgcagataaattcgtctcttaaatgtgtcaattaggctctttcatggtaacggacaaaaattaacgaatgaataaatttatcattttttttactttcaaaaactaaaattttatttttattttttagagataaatttatccatactctacatactcatgaaaaaaaaaactatttaccatttatattatatagttatagtacttattttagtcttttcgtccacgggaaagcaagatttccacgtttttcagtataaattttaaatccgcgagaatgagttacgtcatgcgtgaagccgtgaatacgtgattggcaggctcatggggataaataagttacttgttgcgaaagttcatgtggtactgcttcagccaataggtaaatgtgctaacaagttacttgagaaagtaaaagaggattttttatgattattataatacataaaactacatttttctatcatttacagatacatttttgtataacttttaatatatttttaaataaattttccttgactagtttcaaaaaagcaaacattgattaaaaaaacccttggcaatatttcatagaaaaatattgacgtaaaaagagaattgtttcccagcataattgggattggtaaacacttcgatcggtggattgttatcttactagtacttctaatttttcaaacaaaaagaaagtttttttagcatcccaaatcttacttcagcggtggctaattatgaatctagataagagaaatgctactaacattgttcgaatatattctcttaaatgcagtatttttgttattaaatgaaatttatcatattctttatttaatgaaaaataattatgattttgtaatttaaataaattttaattaataaaaataagttaaaaaggattttttgaaaatttaaaatttcaactaataaaaaatattatattcaaaaaaatgtattattagtatttctcttaatcctatctatctaaatcaatactaatggttgattgacacatctatactcccttcatcctattttatttgatattttaacaattttttccattttgattgtgattttacaatattaataaaatattaaattttgcattatatatttaatcatttattgtaaagtgagaaaataaaaaatatacaaataaaaaatctaattaatataaaagacaaagaatatataaaaaataattacatgatatcattcatgaaatttaaaatattaattttttaggtattcagataaagatattatttccttttcgtctcaaactttggcataaatctaagctacgatccaataaaaagaaaaaggatctaatgaaaaatatttttaatcttatataaatgtagaagaattttttaataattgtattttagatataatatttattaatttatagtaatttataaatcggtcaacttgactcatgatgaccacttaatttaagaagtagtctataaatttatttttaatgaagtatgaccatttatgtaatgtcaaccgttcattagttaaaagagaaaacaaattatataggccgacaatggaagtggaagaaagattaattcggtgtaaaataaaaatattaaatatcatttataccataaaaaatttatgcctttcaatcacaaatataatatataataaatttaccgattgaagaattatgttaaaactcatgacaataacttttaatttattaattattaaggtgtcaaaaaattacataaaaaaatacatatagatagtttgcttaaacttaaaaaaaaaagtgattttttattaaaaaatactttaaaaaaacttaaacaaacaggtcaaccattatattctaataaaaataccccatcaaggaagaaaatttaacggggtaccggtggagaaaaaatgaataatgattaacgtacgactggtggagaaaagatgaataatgatgaacgtacatatggtttttagacgtctagcgttcaacccaaaaacttggttaattatatgcataaatatgattaattttgttttataaatagtttaaagtaaataaatatgaatatatataatttgagtaaaatttgacaattagtgaaagaaaggtaaaaataggtattatagattttatgatgtaataaaaagagaaagataaaaataaaataagagatattaatgggtgtttaagtatcattacttatgcataattatgttatataattatcattaattttttataaactaataagttattgattctaatagtattaaattttctccctttgaatataagacttcatatttgattcttatgaatacttggtaccaatattgtatgcataaattttttttattaacatacaaggtaaaaaatcaaccactatcaaacattttaataacttatggctctattaaccacaatgtctaaggtgatcaagtgagttaggtggtttaaggttgacaaataatttttcaataatatttattaataaaatattaaacggttaaaatgaagtatttttttatcaatttatattttatattgtcttttatcacaccatccttttttcttgttccttggtccttttcctctctcgttcgctgtgcgtcgttattgtcgacgtcatcactaccttgttttattttcccttcttctttccctctcttcaatttgctgcattcgccatcatctaaaggactgagagaaacttgtagatccataaccatctaaaagtgagagttcaaaccattgacataacgacattaaaaactagagacgagcatcaacaccgtaatttaacaaatatgaagatatcattatcactcaaagcattatgacatccaaaaatagtgagaaaaactagtaaagaaaactaggtcattttcgcaaacatgttaccctctctccctcttcagtcgttctttccacctcccccaaatctggactctcaaaagtgttttgatgtcgttttcgtggaggaagatgagactgacaacgatagtgattccgatggtgagaccagtgagtccttccttgaggttgcagatggtgagaatagaagagaccaatgatgagggatgaataaaaaagcaaaagggatagaattaagtcacaaggattaaattgtaattacataccactataaaaactagtccagcatggatgaggggctaaggtgggtcaccgtcttcctaaaattttattaatataaattttattatatatatatatatatattaaaaattaaaaaaataatttgacaataaaaaaaggttgtattgtataatatcatatgatacaatattttttaatattacattaaaaatagaaaaaaatatttttgagattacattgcataatataatagaaatctttaagattatattacataataagataaaatattttttaatattgtattcaaaaataggataaaatatttttaagattgtattgcataatataaaatatctttaaagttgcattgcataatatgatagaatatttgtaggattgcattcaaaaattggttaaaatcatatacttaaattagtataaatagaaacatatttttgtgtttatagtatgcattccattctaaataatattagaactttagagagtttatgtttatctcattgagagaattgttatgagatcatatagaagcattttacaagtctgattcttaactctctatcaggatttaaagatacttatttattatcatagtggagttgtccattggattgattatccaatttggacatcgtattttttattcaattgggttttctacgctaaaactaattgtgtcttctttatcttttatctccatattattgttttgagtttgattttaaattctgaattttttattaagactcattagactttgtttgcttgttcatcaaccccatcttatttgcaatttgtctatatgtaatttgtgaattgtgatttgcctctttttgtatattagatttatattatctttaaaatacttttatttatgatataattttttttatgttcgtcccttcaatgaaattcttatgtccgccaccagcataaaccacattgcttactagtccatcgtacaaggcatcctctattaactacttgttagagaaacttaatcatgattagatattttaataacttaataatcttcactcttaactacttatgatgagaagaaaaaatagccatatttgaacatgtaattaatcatgtgcagcaatctaaaacgaataacattcttaatcacttgtaagataaagtattatataatataagattataaatcacttatctacatttatttattattaactatttgtaacagaagattaatcatacttatacatttgattaagtgtaaaatatgagtggaatgaatataccgagagaagattctggagtccaagattccttgaaacgggcctaacctaaatacctaaatacctaaatacctaaatacctaatctatcgcccattggttacgcccacagcacagcacagtggtccactggtccactagcgtctagcgaggcgaacaaaaaagtgaagccacctctctctttcaattattgtctcttctatcggactctgtttatttttccaccaaggcaattttttttctttccattcattcatttcactccgtacgcattattcacggccacatttaaaccacatctctcttctcttatctataaaacaagaaacaaaggcacctcatcctctcacaccacatccaccaaagcagagctagtttagttagttactcttttctgcatgttggttctctcaacaacgactcctccgccaaaaacagaagcaaaacaagattattcattatttttgttgggttgaatccccgggttgaagcgttgcagacatcacggctattctaagagtctctcgctccctcattcatgtcccaactgtacgacggaggacgggtagttgcgtaacttccgccaacccttcgccgcacggtgggcgtggtgctttgccttctgaaggtggtagcccttcagacttgctcttcctcgctggtggcggtgtcttctagtttcttcactctttttattacttttagcctacatactcttaaataagtaaaaaaaaaaaaaaaaacaacagactttgtgactagttaagatcgccgtttcttcttcttcttcttctactttcgttcacaaaatgatgctcagactcaagagggttcccactgtcgtttccaactaccaaaaagacgacgctgcagaatctcctcgtcctgtcggaggttgtggtcggaattgccttaaagcttgttgcattccaggtacttctttctttttttctttctccaactcatatatgcatgtgcatgtaacattcacggttttttttgtcatcaataactctctaaagttgagttggatccattatacatggctctttttttttttagttatttgtgttttttgctttgttaacagatgcaaagcttcctttgtatgctttcaagaaggctaatggaaaggatttggccctgcatgcatgcgccggagagcctcccctcacattcctcgactcacttcttcttggagaggtagatatggaattttgctcatggagaagggttaacaccatcttttcttgttaccctttgtgttaaagtttctaatttttttttttaccctttcatggcagtgggaagatcgcatgcagaaaggacttttccgctatgatgttaccgcctgtgaaaccaaggtctgttttgttttgtttttgtcttcctatgcatagatatatggatggtatgatttctgagtttgatgtgttttgtggtgattctgttgtaggtgattcctggtgaatatggtttcgttgcccagcttaatgagggtcgtcacctcaagaagagaccaactgagttccgagttgacaaggtccttcaaccctttgatgaaaacaaattcaactttaccaaagttgggcaagaagaggtcctcttccaatttgaagctagcgaggatggacaagtccagttctttccaaatgctccagttgatgttgacaattctcccagctttgttgccatcaatgtatagacactagcttttgttcttgtgggttcattgttaggcgttttatgtaataactgatgatgatgtttgtttgtttatcgattttcttaacaggtcagtcctatcgagtatggacatgttttgctgattccgcacattttcgagtgtttgccccaaaggattgaccgtgagagcttcctccttgcacttcacatggcagtggaagctgataatccatattttcgattgggttacaacagcttgggtgcttttgcaaccattaaccatcttcacttccaggtactggaagctgatcaactataccacttaatagttcgtgttgatgattccgctgtttaattctacaaatctgattgcattttggtgattttggcatgaatatatatgcaggcttattatttggctctgcccttcccaattgagaaggcccccactaagaaaattgcaagtttaaatggtggggtgaagatatctgaactgttgaattatccagttagaggtcttgtcttcgagggtggtgatacgctggaagatttatcaaatgttgtttcagatgcctgtatatgtcttcagaacaacaacatacctttcaatgttcttatctctgactgtggaaagcaagtctatctgttaccacaggtaaactaattcttgaagcaagtgaatttgcctaatctattttcattagttgtgtgggggtatttaccaaatggatgaacagtgttatgcagagaaacaagctcttggagaagtggatgctgagcttcttgacacccaagtgaatcctgctgtgtgggaaattagtgggcacatggttctaaagaggaagaaggattatgatgaggcatctgaaggcaatgcttggaggcttcttgcagaggtgtccctctctcaagagagatttcaagaagtcaatgatcttatttttgaagccattggctgtggtgaattggaggatgtcaatgttcaaagtgtcaaagaagctgatgcagtcagcacaagcgaacaccctactgtggtggtgggttgtgaatgtgtggttctacagtaacaaggctctaacattatgagcaaattcagcaaatccgcagtgctttaagaataattgctgaattgtgtcaccgtttaagtcacatagtagtgtgctgtgcttgagccttaaggtcgtgtgttgtatgtatttgcttttatctgcctttatgacgcgttcatgtgaaagtacgatgtaataactgctcacctgagtactgttgttggtgtttagaggtatgatgtatcataatgcttgacttgactgtgagaaataataaattcagtaatctgtttgtccttgtagtagttcttaaggatgaaatcttcacttgctgtatttctggtttccctttgtagtgaatgttttatgttatgggttaagaatttggcgagaatctttattttatttttattgctgttttttcaatgcctcttggctgtgcattagtgcttgatcgtttttagattttgatagaattgattatgaattgttgattgtttcagattttgttagaattggttgttaatagtttaatatgattaagaatgtgttgtagtacaagaaatggattaatgttgtaaatcatagaggctatcaatagattgtttaatgagttggtcttcaaattgattgcatgatgctgtcaaagtgctatgttgttttagattctgtcatttagttattgtatgttgtcgcttataaaaaagaaatcattacatgcttcaagttgagcatagtccttagacagtgcagaactttttaatttttaatttttaatttttaatttttaatttttaattcatgttaagttggttgcgttttgggacagggcacatactcatctcatgtagggacatctgccactcaaacgctttcagtaattaatgatgtataatgtagcaattaatgatttggtatgtatcttcctcaaaaaaacactgaagtattttaatttaggcttaattacccattgcatcgtcaatttagtagtattcagcaccggttcttgcatcttgagtattcggacagaatatcttcaacacgcacaaagcaaattctggtgatgtacttgtaaagactagcgttctaagtcagtacataaaggatacaaatgggtatttaaaattagagagaataccttatatcctatatgatctatttatattatttcctttttacatatttaactgatgtcatagggaatttgggcaattcttttaattgtttccttttaagctttctaaagcttaaagtttaaaactattttttttcctcttaagatttcataatcataaaataagataaaattaataagtatcaacattcagctgagcacataaggtgttacaatggactacaaacagaattgagtaagcttgaagtcctgaggtgcgtcaataatattataaaaataagcttgaagtgcgtggttggtttcacgttggaatgtctcaaacggccgttgaattaaaagttttgaatttttacttttcacaaaatgtgcatgggaatgtgtgtctgtttaatctaatattaaaccaaatgcactcgaaatcttgagactcgtcaatagtattattaaaactgtccgatcgtcgtcacatgtcgtctggatagctttattttattcactttgctttcttatttggtattctttcttgctttttatttatttttaaatcgtgcaatgcacatgtttttcaatgctaataaatcacaaataacatacggagattcatgaggtagttacaatcttttcagaaaggcatttcaattttcatgtgaatcagttcccttcaataacgtaacagttcatttcatggttttgcattcatcatcatgttttacaatcctaaatcacgcaaccttgttttgaggatcaacatacaaatgttaagcctctcaactcattatgcaaaaagcacagagctagctgacaaaatattccttctagtgtatatgtaactcgaacacatatatagacaacgtccaccgcccataacacgagatcaagaccatggttgttattcatgcaagaaaaacatgcccctttggcttgtaagaaaagcaatttactttcacataaacatgtatgtatgtatgtatatatatacatatatgtatgtatggatgtatatatatatggttccaaaatgctacccttcaagccacttcctcaagatgagtctaagagcacaatcttcagctcttgtaacattggtggtggtgctgttgctgatcaagatagagggaaatccaacaccaaaagaagtccatgagaatggcactgatgcctcatcttcatcaacatcattgatggagaaagatgagaaccaaatcattggatgcaggggaagaccactgatatgtagcagaggagagtttccaccaaggtctatatgctgtggagaccgttgtgtggatgtgactacagacagagaaaattgtgggctttgtggggttaggtgcacgttgaatcgtcaatgctgcaaccgtttgtgcttaaacacaaatgtgaacattttcaactgtggtaggtgtggaagagcatgcccccttgggaggttatgtgtatttggattgtgtgcctttgagcaagcagtgccaacgccaacgccaacgccagtgtcgccatcaccgccggtgtcaccatcaccaccagtatcagtatcaccatcaccattgtttcctcccgtgcctccagcaaagtcaccacagccaatagattaccaacctgaaatggattaagtattgttgtaatagattgtggatggggtctcttggttacctctcccctgctttgaagttcgtatctttgtcattctaaaataagtatttaagcctttattagggttttcatgtgcaactgtttgtgtcaagctgatgttggtatgaattatatgatgttgcagttacatatgatgttggtttgatactttctttgttagtagcaaaacatgttaattttatatgagaaagaacattataccgagtaacttcctggtttttgttggctgacagtggttgaaggaactaaaaggagaagtatttattgtggagaccatacgagtgcgtaaaaaaggtcatggacaacataatctaagagcactggttagcatttgcctcaatagtattattagattaagacattttaaagtacttatatcgatcatttaaatatgtaatataaaaatgacaaattcttacatatgatgtcctctctgaggtcatttataacaaacatgatatgccaatgtctaccagttatggttttgtaattcatgaatgctcgcacatcttcaaatttgaaattatttatattcagtaattgttacataaaaataaaataaatcatttatatgaactacagacacaattagaacaattatgtatgtatattcagttcaattcaattctgagcgttgcacattcatacaaaggacatgcaacatcttcatgttttaagacagttctcctccttcagattttttccttttcaggacattggttatgtgctaactgtgtcttactttccgcttacttgagcttgaccttgggacttctcagtttccactattctctttaaggagtctttgtgatttcgtttttttagctgtttccaggttcttcctcagtaaattaatctctctaatatagtaatgttgtctgtcgatcaccaatccaaggaacagagagaatcctgcccaataattaccattttataggatttaaaactcatgttctgcacataatagtatatcagaagtgctaaagagaaatctatattcattgatacttgatagaattcatttctcaattaaatgcattgtccaagcatgagtaatggcaaaatatgctaacaaaaccggattataaggttggtttggtggtgaaaggaaaaggaaaaggggaagagatcgtaggtttgaatctcttaactaataaaaaattaattattagtaactgacatttgccgataaaaaaaatgtcaaaatatgctaaagctacttttagttagcacatattcaaaactataaatatagcctcttcaaataattaatagagaattttattggtgggcatttctcaattctgtttgccacgagtcaagcctagagaaacatttatttgtaaacttcatagtgaaattttgatgatttcaaccttcttgtcacctttcagagaagttatgaaactaaacagatgcttacactagtacacgtggggtaagtaagttcgctttctgttgtgtgtaacaaaatagtcctgcagatattgtaactttgtaagcaaacaaggaatgtattttttgagtaattacccaagaaagctgcttccaagagacgatgtgccatcaacacctcatcagttggattaacaatgccagcatccttggaacgcttttggattttgattatagtatacacggtggagctcaagaccacacacatagttgctgctacagtttttgtgactaaggtgcccctcccctgcttcaagaggtctagccccatgatcaccaattttcgtattggatttgcaaaagataatattaagatgaatgctatttggatcatcaaaagtatgaataaaagttgtatcatctttgtagaacttcttaaatgttgatttctgtggtggaggtaagatgagagcctggatgaaaaataaactctttattttgactgagtaccatgtgtttataagctgcttttggagacttgtgaggttaggcgaagaattatgccatgctttccgttccaagaccgcagcaggcacagaataactttgaacaagaggaatcagtcccaacacgtttgatgagaataaaactgaatatggcctgcaagcttgagtgatctctaccttcccaattcaattatcaattacctctcttttcactttttcttgagaatataaaaccttgccttgatcatccaagactttttaccctgatttttttgcaatttacacaagcatattatatgcaatatatactagttttagtacctgagcaatacaaaggacgtatgttgaagcttggcaatgttgagaagacaactaacaataattgatatacaattattatttagaatgatagaatgaaaccactcttcatatatttatcaccatgcatctctcgtcaaccatttttcatgttcccagcaaacaaactaatttgcatgttgaattctatgcatatttttttggattaagctcttaattaacaaaaataaataaataaaagcattttttcacatgagaattattaacttatagaggctacattcgatgtggcgtatataaaaacccgggaattctagaaggaatttaattacggcagtgtattattgccaatattatatcatccccgctttcttggaccctatgatgatatgtatctgaaaattttcatccgctaaaaaatagtgtaagaataaagtgccatgaaaagaaatcgtcttattactccaggggcaatccctacagtatagttcatagtcgtttcatacaattttggagccaaaaactgtgaccctcttcatattaaatgagaggaatagtgggtagaaaaaacacaaccatgctgaattaatatcgaagggaaattgggatatgatcctaaagagtttgctcattacagattataaattacgggcagccgcaattcaaaacctaaacaaaagagaacccattatggtatttgaattttgaggtttaatttactccatttaaaattagaggttcagttcatatgtcgagcagaagcctgcgaggatcctccacaatatctttgatgcgtcgcagaaagaacactgcctctcttccatcaataattctgtggtcatatgttagagccacgtacatcaatggtcttgggacaatatttcctccaacaacagttggacggctcactatggaatgcatacccaagattgcagactgccaaaaacaataactgcatgagttttctttctaaataattaatttcatattttattgttcacaataattagcatcattaaaaaaaacaattatacatatttaactagtaagggaatagatcagaatatttggcttgatatttagaattaaactgatccttctgtgaaaacaaattgcatattgaagagttactggtgacaaaaataatgaccattttcattaaatgataaacaatgcctgaacctaccaagatagaaggaaagcaatcaatgattatgtacaatcatatacatacagaaacaacttcaaaacatatcgaagaatgtcttacaaattaaagaaaaaaatataatgatatttatcttagtataacttccaaacctgaggagggttgataataggggtgctcaaaaggcttccataaacaccaccattggatattgtaagagtgcctccagccatctcatcaattgataaagttccatcatttgccttctttgcaaaagcattaatctgcttttctatatcagcaaagttcatggtatcagcattgcggataaccggtacaacaaggccctggaatggcgattgagggtcaatatttgttcaaatacaacatgcatgttgataattttcatggccatgcaaaaaattgcaaaattagactatatactagatcactagtaaattagctccatagccatgacaatagttgacataagttgatcacagagatggctaagtttcatcaagacagtataatgattgattgatttctcaacgtaaacaaagtaaatgagaaaagataaaggtggctgataaaaaccttcggagtaccaacagctatgctgatatctatataatctctgtatataatatcatcaccatcaatgacagcattgacaatcggctgatgttggagtgcattaacagcagcctaacatggagaccataaaaagtgtatgaggaaatcaaaaagggaaaacccagctagtctatacttcagtaattagaaaacatactttgacaaagccagacataagccccaatttgactccatgcttttcaacaaaagcatccttataatcagaacggagcttcatcaaattagtcctatcattaagagcagagcaataaggaagagaatgataatagtaatccactatataaggatatgacaggaaacacaacatcaagaattgacaattaaacacatggaatcactctttttgattaagtctacataataactgaattacattcctccccctccccctccccctccccctcatttaatcaacagaatatcccacgatactgggtgttatcgcatagaaactactcagtggcataatgtaaaattacatagatgagcaaaaagctaagcataaatgcaagaagggaaaaatgcttcaaccccaatacatataagtcaatcgtttccctatcttcttctaaacaaaaaaataagaaatgtacaccaactaagacaagtagaaattgagagaatacgtaacaggtttgttgatctgacaaagaccaagaaaaattaacagaaatgtaatgactctccaatgtatcatagctgtagaggacagaccatgggttgaggacttcattaaatttagacaactgtgttccattagaaccatcaccaaataatgtaatagtgcatttttatacacacatggggtaaaaaaacagtttgagcaatattaaaatcatatgctacaatttgacaatcaacaaaacttacatatcaacttcattgaaggttgtcagcatagcaaacgtgttttgggaatctttcagccgtgtagcaactcgtttccgaagccttgtcataggaacctttgataacaatggaagacattaaaacaactttcatggttgctaaatataattcaggtaggaccaaaaatcaaaatgcctcactcgtctttctctttctttaggaggaagctggggctcggtgggagacttcagaatggcaggagatgctttgggcttctctttagcaggagcagtttcaactttgggagctttcttctcctcgctaaccttttgggttggctgaggagcagctttctcagatgtagtctcagatggggcaacgtgagttgcatcagcagaccttgaaatgattgctatcttgttacctggctcaacagtatcaccttcgttggctagaagctgcaaatcattaaatagatcacacaagccaaatttaataaaagagaaacaagaaagaagagagtaacaatttcttcatttcagggtggttgaggagagtaaaaacaatttaaatctatgaaactgtacctttagaatcacgcctgactcaggacttgaaacatcaattgtcacctaattaaggaataaaaacaaaatacagcattaactatttggaaatcaagaaaattaaatgtttataaccatcaaaatccttcacaaaaatttgcatgttgctttgacatagcaccttatctgtttcaatttgagcaattggctcgtcagcattaaccctgtcaccaggtcctgctcccatataacaaatcaaaacacgacaatcagtcaccaataattcataaattaacaattcaaatagatgacgaaaaaaatatacaggataacatactcttcaaaaattgtgccagagttccatcagagatagattcagccaaaggaggaaccacaacatcaaccgtatctcctttatcacaaatataaattacattagcaatcttaaaaatattaacaatcaaaagccaaaataaaacaggttaattaaacaatgtaaatgccagaaaaatgaatggtacattaatagacgcatcaatagggcaataaggcaatagtgtcacatcaatagctcaccactttctgaagaaaatagacgcccccttgttcgaacggttgcctctggatgaatgaccaccctacaaagcaataaggcaatatcagaacagcatcactgtggataagaaattgtaactattttccattccatccgattattaattaatgatttgtcattattgcacccccgaaactccatgtgaaaatatcatcaacagaatttgatcgagtacaaataaaactatagaagaatacagaaaatgcattagtgtctacttctttttttcttggaaaataaaaatcatttcaaacttgcatctcgggacattcaattcccttaataacaccaataaatttaaatacttggttttttctaagaagatgaccacatgataggaatgtttatgtgcataagctagcattagcaacatacaagaaaaagagtaaaatttgcagctaaataatactgaaaaaggcaaggaaatattagtacaaccaaatttgtcatgactaaaattaaggattcgaatcatttgattggctaaggatttgaaaacaatttcatattctcattttcttactatattttttattaccaatccattttttcctcctgaagtcagtaaacatttctgcattactttatttttgttctaacttctaactatatttaaacaataagattgttgttgaagcttccaaacccaattctaacatttgaaagccttgttggagagcttgatcttaagtttccagactccagctaattttaagcttttgtataactaaaacatgttttcaattgtatttgttattttcaaggaaaagattaaagacaccaaaattctaaaccaagagcacccttacaatctatcctatttctgagccgaacttttttacataaattaaagagaatcctaaagcaatgcttaggactattaaatggtgccacgaacctcataggctttgaattaatccagcttcctgcaacaacaacaaaatttatgatttaaattgcaaaattgcataaatcattcaagtaattaagtcaacagcatctaaaatatttaaaataaaatgtacccaaaattaccaagtgttatatgactgaagttttggacaaatccacatccgcctgaaggaaatgcaatctgttaaacacaataaaacaatagttgtaagaaacttcaaaggatacaaataacatataaattccaaaatctaaccctctataacaaagaccataagtaacagtgggaaaaaaataatgaggtcatcacctgtatgtaggatacagtatcacagaacgataagtgaaaaaatcatgtgtgctaattattacttacaagaaatattttttagagaagagagtgcaaaaaaaataaaaatagataataagattgtcccaagaaatttacattgtgtagtctgtacacaaagcaggcagtctatatatccattagcaattgccatactttgctgatataattgagtaaaaaaaaaaaagtaaacttactctatcacattgaatttgaacaaccatatgttaatcagaccacattttgaacaagattcaaacaacacacaagagaaaaaaggtcataaacagaaatgacgatgaccaattacttttcaaactgttgaaaaatccagaagccatagatgtaggaaatagtttcaacgtcaaaaaagaaaaagttagaaaatgaaatgcaccagattaggaacttgccaccaaggacaaaccagatgagcatcagagtcttttcaggttatgaaagaaattttatcaaaaacaattacaacaattaagcaagattaggaatttgccaccaaggactcgacccaatattttcacattctatttgtccaggtagtacatttaacacatatcccaaagggttaatatgttttagtttctataaatataattcgctcttacacactcaaaataaaatagtctcattttggcggtcccttgtttatggaaataggaaccacatgtgacatttccacaaatgagcgacaaaacgaacaattttattttgaaggactaaaagtgagcactaccttatttgcatatactaacaacatcaccctatctcctaaacataatatttgagtaaccatcagtgttaacagttgagaaccgataaccatcagtttcttataagttataagaagaaaaaacatatcaacagagtatatgcagaaaataaagacaaacacctctttttccgcaatggaagaagctctagcagaaactgatgggccagaccgaatcttctgaactgactgaccaagcaactgaaacaaatgcagaacaggcatcaaacatgacttaaacttaaacttcaatctgtggattaacacaaacacattcaaattgaaaattcatcatgattcataagcgtttagaaaagaccgagctctcacccaaggaaacgggctgccagaagcaacccttcgccttacgacaccaaacatgattacgcagtcagaaatctcttcttcgtccttcggacttcaaacctaatttgacaaataacaaattcaaccaacaaaaccataaaaaaaaaaaatcagactgaacggaaaatgcttgcatagataacgtctcggattcattacgtttctaaacaagaatattaacaacaacaacaacaacaacaacaatacacctattgcgatgtattttcccgattcaaccgttctagacgcagatttgcgaaattgcgctgcgaaaaaaaatagaaaagctaatttctcgggaaacagagacgaacctgaacgccaaacgcagatggaagggtagggttgacgatggaacggagacaaaggagatcgccgcctacagagttctgaagaacaatagtattatattcgctctctataattgaatttcttatgtctaatttccctatcttttcgttactgtcttgaaaatactattttccaggtcaaatatcgcgtgtttcaaattttaaatattataatttttcttcctcacctttggaaaaaaataatattatattatattttcttgattaatatttacatttctctaatttaattgttaaaatgcatttttatcaatcaaatcaatttatgatattttcgaaattagtagtttccaacgtctgaatctttgtattttaattcatatctttttactgataaaataatctgttgctaattaaataaatcaaacctttcttcatttttttatttaaactttgtatttttttatatttccaatcaatcatggaatgttctagttatttgtcagagtacttatgtagataaaaaaatgagttatacaaagttaaatttcattttaatcataattttaaaaataaaactaatgcatctgacttcttggattgaaaaatccattagcggattgtttcgaatatatccaaaaccaaaaaactaataatcaataaacttatcatcaaagaatgtctttatcatttattttataattattataaatcagacacacttaattatgaaatttttaagttataatctattaaaaatatatgtattttatttgtataggtaatagtaattaatttctttaagtcattcttaattgtacagtctcagacctacacaacttccgaatatctctcatccgggtaattcattcatatatccctcccgctggaagcctgctagtagaggtgttcgaggtctggattggatcggttttgaagcaaaaaatcatctgatccaatcccttcgattttgtcatttgatcatccattcggtttgaaatttttttcaaatccgatccaatttttttcggtttggattggattggtttttgattttttaaaaagtctaaaataaaacttatgagacttatttttatcaaactaaggagtatctagcaaaaacaaacaaatttattggacaaaaacaaacaccattttctaattttcattggacaaacatgttcattggacaaaataaggagcaatgtattggatttttggtttttgggctatgatgaggaataagcccaagtaggtaaagggtaaggtaaggtttataattggatcgattttcaccaaccaaaccgaaaaccgatccaatccagtgaaaattttcgatttttttcggttttcgatttttcgattttcggttatttcggttatcgatttttcggttcggtcaccgcggtttgcatcggtttggatcggttgatgaacacccctacttgctaggagtcgctccttgtttgtgacacatctcttgtgcatcgatgatcattcctcacccttgttagcatctaggatgtcacagtttgaacatctaacttctcaatagagagcaaacgattggagaaaatggaagaagctagaagctattcatcttatgagatcatttgataaatttttggaggaataaaggctccaactcactttagaaaaaattgaagttatatatctataacattgcttaaggagtagaacacaaaaatatagatgaaatgaattatgggtgagagctatgctagaagaatttgatcgaaaattaagtctagatattcgtttcatcacctgaaaatcaatttgttgccaggcaaaaccagtttctcatctatccatgatcgttccctgtaatagttttggcactatgtagagtcacaaagtaaccttggatatccatagtggcctcaccgttgtctccatccctattgttcttaggatttggtaggtatcatttgtgccaataaatagtaattgttgttcaacttttttttgttgttgaccatagtgttggtacgaattagttctcatcgaaaacaaagactaacttttatcgggaaccatgagcgcacacaagatgaatattctcctcccaacaatatttattctatacctaaggaccaaccaagattcaaacctagatcacttggttaataacgcaaaccattatcacttatgtcaactgatattcgacttgaaacttcttttgcccgacctttttatttagtatatcattgtaaggtagtcttttagcaccaataagttatatatattagactctgattttttgtctttctttgatatatggtggacttaataataataaaatggtgttttttagtcattactaatttactatgttaaagatacttattttaaataggtgtgttcagtgatagttaaaaatggccaaaaaaatgttagtgaaatttggaacggaagcaaaattgaaatatttaaaaagttgagagtaaaatgcaccaaaatattattagaggcaaaatttgccaaaatataaaagttgagaataaaaattacaattaaaccttaaagttaatcacaattaattttgataagattaatgtaaggctcatttgttttaaattaagaagtgcttttaaaaaatgtgattttttaaaagggaacgacttgcatattaaaaaaatagtttaaacaaacacaccaaaaatcacaaaactacttattttattttaaaattaccaaaaatcaaagaagtcttttgatattcaaaaatatacaaattttgatatattaatttttagaatgaatttcatatgattttttagtagatatataaatactgcattcatcaaacaatctcattcaactcttgaaaaaattgtagactttatttcttatttttcttatcagttgctagacttttctttctttcttcacacttcattctctctcttcgttgaagacaatatatatacatttgtaactttgttcacaaagaatgttattgttctaatgagtttccaattgaaccaatagaaaaatcttcatgttcaacattaacaaataatgacgatcataattttgaacctattgttcaaaccaaagagcaagtaggaaaatatgttaatacataaaggactagtataagaagacatgaaactagaatcaatgaattttaaaaaagaaaaatgattaccatgaagaaaacaatttttaaagaatttatccacaaagagaaggcataaattaagattaaatcacaatttagcatatgaaagtgcctcaaagttggataacattgtcagagtaatatattattatttcaaataattactttacaatgtatttatctaatttaaatttaatttatttgaaaaaagtatggattttacatttcttcaaaatttatcatttcttagtattttttttattgatttttctaattttaaatattttctaaaaactcatgtaatccttttaaattttataaatatataaagtcatttttttagataaaaaattattttaaattcttattatataaataaaaattcaaactacaatttttttattacaagtcttttaaaaaatctattaaatgatgacattcctacctaatcttttaaattttacaagatttttatattagaataatctttgaaaatcttaatccaatacacctaaagagtaaaaaagaggcacttagtatctctatattttttagataataaaataaaatataaaagatggagattaaataaaaatgcaccgtcatcgaattttatatgtaattaatgggttagttctttcatatgcatttaaaatataataatgatagtgtataatgttatttaaagaatatactagtctaaaaaatacgaagacaaatagacatcatcattataatatctataataattataatctttcaaaaatcttaactgaattatattttccaaaaacctttttctacaaatttagttacccaaaaaaaattgtaactaaattaatccccaaatatttaattagtcattagtcattaaattagtcccttccaaattatattatcaccacttcaatcatccataaaaacaaaaatgttaatattttaaaatttcttttaaagatttaatctgttactaaattaaactttagatttcctttttcacttctttaatcctctataatgaccatggtgatattttagatatttggatcactaatttgatgacatttttttatgaaacactaataatttaagattaattgtgtttgcttcatcaaaatttcaagcttgctgcagaagcaccactatctacgagaagtatggtaaggccagactcgatatgccaataatattgttaatatttggaacaagtttttatttataataaaaaataaagtaattatagaatttcattagaatatagtcaagaaagaaatttttgcgctcgatgagaattgagcttcaagacatctcgtaggactaatccatcccacgaagctcaccaacaacacgtgcctttggggggtccaggccccctactactggtcggcaaacggacaacgagctcacgcgtcatttctagcccggattctgacttagagatgttctgtcataatccaatgcacgataacttcgcaccactagcttttcaaccaaacgcgatgaccaattatgcaaatcaacagtgagccaaggagcgatagcctcttttgaccgaaaatagtagaaagaaagaaatactcattgactttggggggacatgtttgttcgtgagataagtgctttgggtatagtctcttggaccctgaacctacgtgcctatgacttcatttctcaagaaatatgcgatgacttaacaaccaacaaatctacctatatacaaaaatcgtaataataagtagtatatgaattgatttgggagaggagaattgagccaaaaaaaaaaggggtaaaaaactgtaaaatacattctgttgagtaaacatcctagttgatttcatgttagcttgactgctccagtccaggtaaagaagttggctgaaggtttgatttggggggaacacctgcagaccgctttagggatcttcgcttttcttctccttgcagagaagctgccatcttctcagggcgaaaatgagttccttccaaaccctgttccggctttctctttaccttctttattaaaacaccgtctgcacccttgacgtgatccaaagaaccacttgaacttcccttagctttttcttgtttaggaccattcaccgaaggattgtgaacccgtgcagcggtgactgcattagaaactgtattgtttactgaagcatgagtatgacaactagagtctgcagctaatcttgctcgcatgggctgttgggaagtaattggactaggatcaaattgaacattctcctttggtcgaggtgccaataagtttttcctcttcattttctcctgatcctaacaataagtaaccagtgagatagaaaacaaaaatcattattctcataagacttaaatatgtttttcatacctgtaatatacttctttttcagtttactacctaaatatttttattattattttactacctgatagtttcaaaattttacttttggtacctacctttaatctaagtccattaggtgataacgtgacactttgttagcctatcatatcaccacttaatcaatgatgtgatactctgttaatttgccatatcatcactcaagggaccgagactaacgacaggtaccaaaagcaaaagtttgaaaatgtcagatagtaaaataaataaaaatatatatttaggtagtaaattgaaatagggatatataaaatcaaaaacatatttaagccttctcacaaatataaaatcctgattgtcatctgtacatacaaaaaacagaaagcaaattctccaattcttctgattcataattcatagttatctatttaaagccataattaaggtaaggatgaagagaaaaattaaaagactcctgtttagtttccaacttagtcatgccacataggtatttgcaggctagaccacaaattactatcgtgaaactcctcttaaattttcaaaactgagaacatgtaaactgtaaaggcttctttgttttaatagagattttagaatattactacaccatcgttatatgctattatttattgcaaaggcataccttatgtctgctgtacagtgctctgcgcctctcttttgacctgcaaattgcacgcttgatcccatggttgtccatgtaaccatttggccataattccgcaagctgaagaggacaatgcacttgaaagtgagaaaaaatatgtttagaaaaagcaaacatattaatttagacaccagaaactgcaatgtatatgcaatacacatagtcacacgcaaaaagtaacacaagcttctgaaataagagaatcattcatgaggactcaaaagaaggaaaaaattgcaataaaaaaatttacatgtgtgaaaaaataattgagaatccttttcttttcaatgtattcaacaaaatagttatcaatcctagatagcaatgcttagcagccaaatctcaagttatagctggatagtgaatagcatgattgctattttaaagattattatacagatatatgatccatcattatgtacataattacatatgctaaacaaatatttaattaatatttcttggcttattcccaactatcaataaaaaatcataggtcttcagaaaaacatacaattaaataaaagcaaaaatgaaggaagaaaaatatctattaagtcagagaatagagatgagaacagagatgggtgttgctgtaaaaatcgccatagatgggaggctccacaggtttggttgtgcagcagaacaaagacagtagagagaagaaaggggttatcaaccacagaaaagaagaggaaacgtaggaaaattgagggttagggttatatacgttttctgaaaatggagggaagtcaattttacacttaaagaaccctcaaaaatgctttttactttaaaggcagaaaaggattttcaccggcttctcagcaaaagaggctacaacagcagtgaagcaaaaacaccccacctatggcagttttgtcacatccgaatgacattctgctctgcacctctgcaattgcaccgcaattgagcactattgataactatggtattgaaaagaaatgatagaagagactttagatagtactaatttagtaattttaacttaaactaggagatatagaaaagaaaataaaatcaaacccaaaggaagaaggtactgaaagtctgaaatttaaaaacaaatatcgagaggaaggcatagaaaatttgaaccacctcagcatacaactttctgatttgcggaccagcattttcatctaacccctggaacaattgcaaataagattcattaagaacaaacttcaaaccgcacaggatctataaaataaatacttaaggttcaaacttctgtacatcaacaaaaaggtcatagagatcacaaatcttgtcttccaatgcagtgtccacactaaaattccttttagttattggtttcccatcaggacgtaattcttgttccccagatgctccagcttgctgctgtagctgaaatgcaggaaaacatgaaaaagcatcccatattaaataaccaaaatcttcattaatcaatcgaaattacagttatttcctgtaaaattacaatcaagatacaacgcaagcatcaggaaatatatcaacaaaactagattgagtttcgtaactacaactaaggaaatccctttccaggtaaaagttatccataagtaaacatgccaaaataaggatttgcatataaaactcaaaattgcattgaatcgatataaagaagcatcgataagaaagagtgaaaataagtatactatgaattataactatagtagggggaatcaaaaagaagctacatgaaccagctaaaacaagcaaaaagtactgaatatttcattttgatatggaatgaaatagaaaatgtaactataataaaccttggattccatagttggggcctgcatcttaatcatctcaataaattctttctttatctgttgaaacctaacatctttctcctgcttcgcagacaaacccatactgatcatattttttaagttactctgtagcaggaagacattgaatgagaagataagtttcaattcaagcataaatggtaattaaaattacctatgtaacgataaatataaatataaattataaacaaagagaaaaatagttgcaaaaattcattgacagcataaacaataaataataggtgggaaattacctttttttgaattggattgtaaaagaacggagttcatggttgagtttgtttgatttttatactgaagaataacttctgaaatataattagagtccacttgacataaaattaattttgtagtgataggaatagagttgtttttgtttgggaaatcaccagcttctactgttagtgttagaagaaaaacatttattatgtaaagagtctatccattaccacaaattagggatttagattgatttttcgtatccatgattgattctttctaccctaatccatgattataaacaaagagcgtgggtatagaacatacgcaagttctactcaccaaggcaacaaagctttacttttcctaaatctatttctatataaaaatgtgaacttgagaaacttgatcaattacaattagtgcatgtttggttcaatttatttgaaggatcattacttatttttgcctgcttcatgagagagtttttaggaaataagctagtatttctcccaaaataatctatactgatcttgcacttagaatcaattcaggaaggccatctgtcactgtggagtcaccaaagtctaaagcaaacaggtccttcattcctgaaggaaaaccagtttttattaaaatggaagtgggcaaacaatcacttaaaaataagaatttcatagactcagacatggcttaggctagggtgggcaaccctcataggtctcccacggtgggagatgattttttcaccgttggatttattatcttttaaatcaaaggtctacatttttctttttcttttttataattgataattatctttcctggtttgcccttgacaccctcgccattttccactgcaaaatctccatttgcagtagcctcacttttcccatcagttcccccttcatccaacccaagatcccctctgccctgttatcgctctcctctccatgaccatctctccctaggctcccaccaccaccgcaatgcgaagcctccaatgctgttgcgctgtcctcgtctggtttcgcaacaactgcctcattactaccaacaacaagccctaccttcctccccgtctactgcttcaaccacgctaactacgctgagtctgcctccaacgctgccacacagccctggttgagtccgtctctgacctgcgccagagactctaggcacacagcttcaatctggtagtgtgcgtggggaagcctgagtcagtgctggtggacttggcgaaggccattgacactggttttctttattgtttatggtgggttgtgatttgttttggttttaggtaattgttttcggtcgtggtttgtaacggtagtttatggtggttgcagtagacattctgccatcctagggcggtttatggtagagatgtcgacagtggcttgtgtcatcgcagcagcggtgaagcaacaagatggagtgagagagaagggggcagggacagattgggaaaaaagaagaaaaaattgaatgctttattttagaagtaataaatctaatggtgaaaaaatcatctaccaccgtgggagacctatgaggattgtccaccctagcttgagccctcagacatatgacattgaaatcaccataaaaagggtaaaggaaaaaaaaaaggaagaaaagagaatcaatctttaagaaggtcacaaaagtaagtcactcagtcaaaccacaatgtgattaggtcacgaatgtattcaaagcctagaatatggtattgttaaatcataacctaatcactaaacaaactacaaattgtacaaaagttcaggatagtggactggacagaaagataggtgatttgagagatgcaataattagtttcaatttttaaattttgtataacttttgggttcaacaacaaaaaggcagcctagtgctatatagctcctgctaagcattggggattataaccggaaactgaaaaatacatactaaaggattatctgttatgtttatcaagcttaaatacctttagtgttctgagctgaatcagatgcccaagaatactcataagacggttaagtaactcctttgatactttcccttggcttgcctgctgcgacaaaaacatatagtcaatattacaatatgataatacaatgttcaaactgagaagaattttgagaaaaaaataatacaaaattgtgcatatatctagaagcatttagcataacaagaaaacaaaatttgccaataccgctaatctagcaactttagcaagtttcagctttatttctctaggcaatctccgtttgacaccctgaggtgtggaatcagcctcctggttttccatagttggtggccttgctgtaataatatttaaaataaaaacttagcattagcaacaaacttcccacattgcctataatgtgagcttcaaaacattttccaaacttacattctgcaactatcttctccaactctcgaatagctttctcaagtgttgtcgttttaggcctagcaatagaaccatctttcttgagcacattttcagatttctgcataagcttcaaacaagatcttgatcaacacagtatatgttaaacacataacagtccactttcacaacttttgttgtcagaagtcatagtaataagaacatgttatctcaccaagtgcacgctaaatggatagtatagtttgccaaaatcttaaagaaaaaccaaccatgtataccaatatcccttaaatagaaattattttgaatgaaaaaggatgacccgcaacagccaaggtaacaagtaaatggagtaaattgaagcaatatgctacactgttaagatccgatcacaaggtatgagacttaatcccacaataatagtccatagtggatggagtcacgggatcactcccaaaaacaatagtgggatgactgctatttttaatatatgtatatataaaatattttttattctttctattatattataatatttaattattacatttttatttacatatattttatttatatatatttatattattattattataataatctataatatatacactacctctgcccctaaatgagacatttttcaagttgtcttttacattttttataccacaatacccttaattgctttacaataaatgcaataaattaataagataaatttattctttctcttacaaggattggagaagactaggacacattaattaattaggtaaaaagtaattaagtggaaagagagatgatgagttaacataattttaagggtaattttgaaaaaataatacaaattgctaaacaaatttaatgttgctaaccaaattaacaaattttcttcaaagatgtgaattagttaaaaaagtcttatatttagggatgaaggtagtaatatataatatgcattatacatttgtctctattatatgatatattatgcattaatttttctatagtttttaaatattatagaatactttatcaaggtgagccctagcacaatggtaaagttgtgcattggtgaccagttggtcatggattcgaattcgaaaacaacctctttccatatacaagaataagattgcgtataatgaccctctcccctaccttcacatagcaaggagcctttgggcactggggtatgttagttttttagtttttattatagaataatttatagtataatatatgattaattataaaaataaaaataaaaggcaaaagaaaacctccacaattgtaggactgcttgggttggagagtagcccggtttagggtgcaaatacaacacccactcccacccaaaaacaaagtaagaaaccttggtgtactttagtttttattatagaataatttatagtaaaaataaaaataatgggcaaaagaaaacctcctcaattgtaagactgcttgggttggagagtagcccaatttagggtgcagatacaacacccactcccacccaaaaacaaagtaagaaatcttggctctcccactacaatagttagctttggtggtgtatttctcttaggattcttatcaattcgcattaaagcttttcaacgtgtctcttaattgcaaacgagcgatgtggatggtgatgacaacattgcagtatttgcttgggactagtcaaagaactagtgcatagccaacctgaatgggcatcggggttgccaagcatggtgagatgataggatccaattgcaaggtatgagacttgagtctcatgttggaagtatgggattctggttttgtgtttataagactttgagctctctaactacaacggctagtttttgtaatatgattttcccaaggttcttatcacacacttttcctggcacactgcatgtcatgcttcaatgtaacctgttaatcacaatggaagttgatctactagaagtgcttatttggtgggcagttccatgcttcatatggtagctatggtttagaatggagaatcctttactttaaagctgaatagcaagaatgaattgatataagtgcagcagcgagccttcttcaacatcaacagcacctttaacccaagttaattggggtcggtggtagatgaacccaatgatagatacgaggaagttaaaaaaaaaaaaaaggaagggggaggagaagataaaggggaaataagacaaaagaaaagaaaaataagataaaataaaagaagggtgaaagaaggaggggggaaacaaagagggtaagtactaaaaagggaccgtatagaacatagaaataaaataaagacaacagaaaagcagctacgtaaacttactggtgtttgtatagcagattttcccacggacaagttaagatctggcagttcattgatgccatttttatctttcgaccgaccagtcttttctagattgtcaacactatttgaggtttttccaggatgggatttggaatgtgcagatccacttttttcatggtacttctgatgagaagtatcaagcaagccacttccatctttatatttatcacatgtgttcttagattgaagtactttggtcttctgtttttcagcaccttctgcagcagcaggagcatcatcatttgatactttcgaacaaacaggaggatctgatgttggtctagtgtcagcagttttcctgttcaaactaattccagacacatctaactcactccgaaatttcatgtcttcataatgttcaccgggtacacccaaattatgggaggaactaattgtatttttcacaggtaatggtgcagtctttccagcagcagtcttgccaacttttacatgtttatttgatacatgactatcaatattttctccaggattcttcggtatatcttttcggcgtcttttctttgcttgctggataggcaatactggaggttcatttctggtaatatagaaagaagaaacagaaaatcaataaaatcaggaatttgtgtgaaaaaattatctactccaaactacaatttaatagattcaaaatgttggcacaacatgtgtaaacaggtgtcacatgaaagaatattcaatcataaaccaagaaaaaatgttatcaggaacaggaagaaagaacttcacaacatcaaatactaataaaggccttaagctataactgatgaaaagtttaagtcaaacaaagtgataggtacagaaaagtaaattcatagtttagaacaatagtgcaatagaccaacaatcagaaatgaaacaagaccaacatttcaagcataaaattaacaagttacaggaacactaatattagtctttgtcactactcaaactatgacagtgaatgatacatgatctcattacatgttcatataacaacacaagcatatatattccactgaaaatgtagtattatatccatcaactgaaaaagaggaaagtgcaaaggcttccaaaattaagtggtttacaaagaaaagagatagacataaagagcacaacctagtgcatgaggctcccacctaggggtgggcatataaactggttcgaaccaaactgtttccgaactgcactggttttttaaccaaaccagtttggttaaataaaactcaattgttttttttttcaaataagtttggttcgaaccaagctggttttaaagccagtttacaattggttcaaaaccaattcagtcctggaactagtttttgaaactagttcggttctgaaccagttttttaaaaccaatttggttctgaactcgttttaaaaatcacttctcaaatttggtttcaaaattgaaaccatttaaaccaatttggtttcaaattcggaatcggtttggtttggtttttttccctgaccagtttttgaacacccctactcccaccaaatgagatttgaggaaggaagatgcacacagacttggccccacaagtgaagaggctatttccaggattcaaactggtgacctccaggccaaaaggcagcagccttagtgttgaacaaaggctagccctcacaaagataagaaattgccatactccgaaaatattcaaacaaaaaacacttacatgcgttccaatttccccctatttacaaagaatccatcatgtttgattgcagaattatcaacctcaaaatactcattctgcagaaagaacagtagaactacataaaaaatatgcaaggtgaaacggcaacaatataggacaatacaattcctgtcatcattaatcaaaggtcaaatggtcataatgtcatgagtcatgacaaattaatatggtataaaaagataccaaccaattcagcatcatcaatgaaagagtcttctgtatcatactgatcatcaggaacatcaggtgcatcctcctcatcactgctgtccttaccctaaaaatgattcagagtcccattattcccaacatggaaaatagctcgaaaaatttaataaaatacttacatatgcatctatgatatgaatttatagtagaaaccaattcatttttgtacagaccattgagtaacaatctcaggaagcaacacacccataccatgtaaaggcgttcaatcttctctattacagcactgaaacggtttgtctgaggtgcatcctgttcttcaatctccttaggttgtccctaaaagtgacaagtgttattaaaatagtgaaaacaaaatcacatagtcacatactatttcgaaagacaatatgctaattcctgctggtatccagatgacaaataattatactgtagcataaaaccagatatagtcaattcaaggctcgattatgccatgccaaaaccagtgttgttttagcgctgacacaattatgccatgccaaaaccagtgttgttaactagcagccaaggcagaatggcaaggtagattttttaccaaccaccataggcaatttgtgaagaaaggcccgccataaggcacaatggtatgtttatggcggaatttcagacttctgccatctgccattgataacactggccaaaacacaaatacaaacagacagacattatatcaataggcataacgcattcaacctaataaatatgaagtcaaatacaagtacttccgcgagcatttcgactttggcacgacaaaaccctattaaatgattatccataagagcagcgccacgcagcacaaaccattgttgaaaaccaacaagaaacatcgtggcataacacgaatccaaattaagtcaataagcataacgcattcaacctaaataaacctaataaatttcaagtcaaatacaagtaattccacaaacaattcaactttgccacgacaaaaccttttcaaataatttcacgtaagatcactgccacggagcacaaaccgttgtcaaaaaccgacaagaaacacccgggcacttcccagttaacaacatgccaggtcaatcattaacattttagcagaacgtaattctaaaaaataacactatcctcattcctaacccttatttcagtccggaaaaaaaaaaaagaaaacacagtcacggctcagtcaaaaaccacctttgcaaattacaattcaaaatatcatccatacaccacagtaaccctctcacacattgcaacctacttaccgaatcacaatgtacgtaaacagaaatttcagaaacacactattactcgaaacaacaatttggaacctaaaaagaggctcaccggagcgattctggacacgagcgcagggttcgcattgggagcgcgatgctccggtgcggaagcggatccattgttgaccttgctggcgtccttcatgagcttcttccacgacactatggtggtctctcccgggcggagctccaccgtgaacattttccggtcgcctttcttcacgaacgaagacggagccctcgccgctgccgacgaggaatcgccgctgccgccgagaggagccacctcctctgcggccatcgattggcgagtttctcgggcgtcggtgcgaggtttcggggaaaaactgttagggcgcgagaaacttggcggaaagcgaaacgaataataataagccctagaaactgaaaaggaagaacagagaacgagaacgaaaagatgaaggagtgaagaggtgaattggaattgcgcggattcaaaaatgagagaaaggaagaaaagagagattttaagtttgagtgcaatttggactcggtcgtaaaaaactgtgttatatggtaattatttagcataagtggattgttgattgtacaattcataatacaagtttgaaaataatttacgtagcaccagttgtttttgttgttgttacgtagggtgtggaagtattctgagtagtagtactttatacttgttttttttatcttgtagcaagaggagatacagcgagtgacacctcctgtttggttgtcatactttttcatgattatatctataattgatgtaatcagttatatttaaaactaatgcaaaaaatatatataatcaatgtaaaaaatcagttataaatataacttgtgtaaaagaatgtgacgtcctatgtgacaaaacaacatgctatgtaaatattttcaaaactacaccaaactaggatgacaattactatgatttagataggttcccataaaactatacacataatcttatttagatataatatctatatccggtctcatattgctccaggtaacaattttaatcatcatttttatacctgcatgatacttatatactcatatttacatttgtgatatacactttacttatatataatatataaggttaataataataaaatcaataaaaatttaattaaaatatttactataattatattaaaattcattattaaataattcaaacataaatatgcacataatattaaaaaaaaaaaacataatattggtttattcaaacttaagtcataaataaataaaaatacaaaaataatcatccatcttagataatcatccagcttaatgatttaggattttttggctacgtgccactataacagtataactatacgcttattcgttcattttttaataggctcgaaataatgataaactagatcttatataaacctgtctagaacatatgaacaaaaatgggaccctacataaaggatgacatgtttactaaaatatccatccactcactcccaaacataagcatatcccaatatcccaagcacaacacagtgacacacatgaacaatatgaggtgcctccacctccaaccttcactgcttccttttcctttgcatgcaaaactcaaaccgcagttacatcatatgagccacactaccaaactattttggcttactactcaccaacctccacgtggccagcacttaccttcagcaagtccactaagtaccaaggcacttccacatttactggttgttgccccagcccaatccggtgacttgtccaccttgcttccaataaggttcaatctctttctttccctttttcattgcttggagaaaagttacttactaatattaccatgtctaaaaaaattattcaataaatttgggagttagaaaagagggtatactaaaaaaaaatgtattgcgagcattcctcctatttatttgatagttcatgattattataattgaatttgacactaggcttaggcttataacaaccttttactccaaaatggagttagtgtgatcttttaagtctagaagttaactaaagatttctttatatattgcagtgctgtgcttctatcggcatacttcatagcaaattttgtcgtgccaggtttccttaccaactctttcggatatgataagccatcaaacgaagagcagaaggttgacgatgtaaatgcaatagaagatgaatagatagtcaagggaggtcacgaaggaagaaacaggattacgtaaatgtgagaactgagctcatgatggttgaagcactactgtacgtgtcttttgtatctttagttcgcatttagattataataaaaacatccaagtgagatttcttttgctcattaatattaggtattctagacttggtagcgattacaatctcatgaaaccaaattgttcctgcccttgatttactggggttactactacccccaaaaaaatgttagtaaacctcttaagagtacagtctttatttaacataggattaatatgattattgtttgatatttaagaatacaagttatttgtactaaagaaatttgccatcaatgattatgtttatgttaatgttagtatagaaatacttgcaagtgcatcatgatcataccattaacgtaaagagttgtatgattcatgaaacatttgttatgacaatattcccccccccccccccccctattatctctcttcccttcctaactttttccaacaatattcatgtccaaatacaatttctcaaacataaattcactgtgttatacttttatattaatagatcaaattctgttagatagagactaaactacccaaaagcaagcattactataattttttttataattacaagcattactattatatatctattaggatatattttttaatgtctttttttttaattattataattattattttttaccgagaacttaatgtcaaccatgaccgaattcctacagagttgcaagcttgaggagtatctcaaaggatctccaacacccgagcagatagcaagtattggcacagagtgaacacataaaatgtttactaaaggcccgaaagctatattttcaattccctcaaataaaaaagaatgaagtattaattaaaatttctacagaatacaaccactaagtatttggcaaaagaatagagaaaatttacagttatctgcagggggaggaggaacccaaaaacattgcttatcctcaataaacacagtggaagatgaaatttgtctaaacaactgcccaaccagcatcgatagaagatttctcagaaggagatggggatccagacttgggaggcttctttccaaacaaagatgacttgctgtcaaagaaactagagaatgattgccgacctgacttttcttcgtcgtttgtctgatcttttgagacagacttcctcaatagtttatctttgcctccaaagataaggctaagcctcctaaatgggctccttggttcaccagtaaccgtagttgcttcctctgtctgcttaatcatttttagagcttcttcgggattcaataacattttctccactgtttcatatacctacacaggaatacgaacattaaattctctattgaatgatgttattaacaattagttgcagatataaatcaacaaccaagagttttattatcaatttacatttccaggggaatgatttttcatccccatgcttaagaagtagggttatcttgcacaacgagcttgtatgttttttttattttttaaaaaaagaaaacagcaaactgaatagttctggaaggtaggctaggtaaaagttacaaatttcacgcattgtgatagtcttggagtgttcctttttcttcaggactctgctttgtgagtttatttatacagtgaatgactgttcaaatacgaggataaagcaataaatttctccactggattacatgtcatattgaccatgtatttcatggtattaatcaatagagaggcttcacaaggattcagggagatgctatataacttcataagtcacttagtctaggagtacccacctggacgagaccatcaactttctcattcaatttgttgttttgacaagcattagttatgtactccttgcagtcatagaataacttcgagaagtcactgttactagacagcataggttcggcaattgcaaatcctaaaccaagctatataattaaaaccaaaggttatgattagaaaggtatagaaatggtataagcatcaatacatatcaatcaaatcgagtcaacttatacgaagatgaaggaacaggttgagtttttatcaagaaactttacaaaattacaggattatataataggatcatttatcaattaagcaacattttggaacaaaatactttatgtaatttaaaaattctgaaataatataaagttaagaataattatatttcttttcaataaaaattggtaagagcaaatgctttaatcttcacaaaaattaacagcaatgccactgaagtctgtatggaaaggagttttactaaatgcttgttttacattttttattaggaaaaaaggacaaagatgtttaaaaaagtatttagttgacagtacacatcctccagtgaaggctatcaattttcttgaatgacacaggatattactattagtcctatgtaacaggaagaacatcccccatccttacaacaacaaaagccttatccccccttcttcaacagaaaaatattaaaagtaatacatttcatctcctttatacaggcagatgataagtatgtttgcacagtttccatttttttacttccctttctcaagaccaaaatttttgatctaggacacccataaccagacattacattgaagatttgaatactccagtttgagccaggttaaaacacaaaagttgaagaatttatactaacaaatgctttattggtggttggagccagctcaaaacacacaaattgaattacttttagactaacaaatgctttacaagtgttataaatattttttaaataattaacattgatacagattatggataatgaagggcatttttatcagttaagggcagatattttggataaattatgcacttaatgctattggaaatttcataaaaagcatattatgcagttttaaactcttcctggtctactatcaatgctcatttcatttttaactgtatactgattatggattaatgggaatgcccttaacagataaaaatgcccttcatgatccataatccataaggttattgtctacaaatgcccttctctaccatacacacacataacatgttgctgcctacagtcctgaaatccagcatgtgaaactgcaagtgtgcatgtgttaaagaataaccctatgctacctagagtcctttgaaatccagcatacgtaacatgttgctgcattgtatattagagctctagggagattttgggaatggacatgtggaggcgaccaattgccttatatgttcgtataaaattctttcaaccaccagcatagataacaagttgccttatactagagctctaggcaggttttgttaagggatgtgtggacatgcccaaccggcatgccaatctaataattctaaactcgcaaaaaatgcctagagcctagatgtcaatacatttttctcctatgatatgcattacaggaaaatagtttagttcttgattggtaccttcatcttcatgattcaagtctattactatatattctacaatctgctttagattcagccaccaaactccaaaaaataagaaaatacaattttcaaataaaaaattaattaatatacatcacttatgagttataatattaatgcttcagagatccattatgtaatgacaaatgacaactgtctatacacaacaaaattaatcaatgtgataaaagataaaataaagaacttactaaagaaacaaacagctgtccaaaaagatcatatggatggatgtcttcaaatgcattgaggatgccctccctataaatgaatgcaacaagggattcaagggatggctttagggttgaaatatataaattaatgcaaaaaatcttcatcaccaacttacactgccaaatcctcatcaaactgaggtgcctgcttaacagcaggtactggtttggatgtttcccacaattcacgccataaattacctacaaatcagatatgtttaataatatgaaagcagaagaaagtaaatgctcgacagttcccgtatttcttgcagattttgtgtgttataacttattataacttataataaagtaagacagtactcaagatttacttatctccatatgctttaccatagatgtgatatgatatccaatttaggtaatatatcttacatagatgctacaaagattgaggaatagggtttcaacactttcaattccatggtttgcccaaggcaattaggaatatgaaatctgaatatctatgctgatatcaattgactgacaatgaaattattaattcaacattcaaaattattcaaactctacatttagacattctggacccaaaactgatcagtttgccacaaaagttcctacattagactgcaataaacaattcccatcatacatagtgtagttcagtagttccatgcatatcttcctcacaacttaccaaatcacaacctctttggaaatcaaagccataaagaacacataaatgatggtaaaatttataagcatagagcaaaagtttactacaatcgatgacaagttacagtgaataattgtttcaagcaaagtaaatccacaattttatcagatgttgatggtccatttacgtagaaaaataccacaaaatagccttgcaggagaatttaagtacatcaatctatgatggaaaagactgaaagtacaccttctttttgcattcgccgacttagctgacctctggcagacaatgcctcaccactatcaaaaacatcactatcctctgtacttgcttcattatctgtccaatcaggaggagagtgccatcttacaaaatcctccaaaatacatccaggatttgcagcctaaaatatgataacaaacaaaactaactcagacagaacattaggcacattcaacatagtaagaagcattcacaatatcagtaagaaaagttcccttcaagggagctccttaccttgaaagcctgcatatctgagagcagttgagagcacccagcaccaacactgaccatgaaaggtaactttgtaataagaaaatgcctaaatgatgataactttaagctattacataattgatgcacatctgtaattaaagaaagctagcatttacaaattatttacataagaaacagatatgatcataaatgtattacaaaatagcattctgtgaatgtttgttgatcaactagttcatcaatgcaaattctagaaattagtaaaaaaaaaaaaaaaaagaccaaagacataggtcataggttcagaatccagactcagaccctggtcgtgggagttcatagtctagatgtgagtcaataggtcataatcataggtttagatcatgcgaaacaattaaaaaaggcatacaggaacacatctaacaagcaatgaagagcccaagaagcaagatgaccttgattattttaataaagaagttcattatatgaaagagtcaattgggattcacacgctatatatagggaaaacagaaagtccatttagatttaagataacagattgcatcatggatgaatctcagttagcatacagacctccctgtccgcagcacaaactcctctgtttccctgattagatcttctgtaagcaaaggtccttcctacatgaaatggtcccaaagttctcaagtataagagtaattttaaatagtgattatatagaaaaaaaatatatttatcaaacctgagtgattggagaatacacaggctcgccagtttccaacaatgtcatatctccagcaggatgatctgcaccaattcgaagaacaagctccccactattcaatctagcatatagaacagggcttgcaggagctctggcactacaatcagtcgattcttttatgtctgaattagcttgcatcatcatagagtctaaagattcagtggcaataatacggaaccttttccgagagatgcagcaattgattacttgaaattgttgatatagaagacatgacttcagatcaggaatctcattctgggggactcctggtaagtattgttcctcaaaccaaagtttccttagctgtatcagtaaaataactaatcaagtttaaaatattcttcttcagctggtaattaaggaaaagtaggattagtgattctagttaagttcaagttacagatcctaaaccagaagaagtttgtatatgatttttttttttcttttatagacaaacagatttgaggaggaaaagaaaggcaaacaactttacagtgcacgagggattctgttgttttggtttgaaagccttcaaagtttccaataacacagcatatgaataatttgcttccttttccacaaattttattttgcaaaggggaagggaaggataaaattggatgcaaactttaatagaccagaatttaaaaaaagaaaagaaaaaagaagcagcataaaacaaggaaaaaaaattcactacccaactgctcaaacaaaatgaggttctcaaacctttaaaataactattaaaaatcaaaacaagtaggaaacaaaatttgacatttatcaacatggcatcatcaagttatcttgcatatttatttggccaaatcacgtgatctaagatgaagatgtcaatgatgatgatgcactctattactaagatcataatcacttaaactgacagttacttcagataatagtttatatataatggaaaaattgatcaataatgtaaattaaatctagagttctgggtaagtaataagatgtatgattatgatatcagaactataagttcttttgaagttaaacatacttcagcaacaaccccacaccagaaaagagccatttttcgaagagtcttgtagtttccaaggatttcagctagcttaacaacaaggctttcgggaggcgcaccatgaatatctcttggcaaagatgtcatagcactttcctctagattcgagtcgatctttcttctaaggaaatctccttctgcgaatatcttgcaaatattacaacgaaagtgaaagatcataacagataatgggttaaggaaaatgaggacaagcattaaaacgttctttaacataattacattatcagcaagccacctacaattcacatacctggatcaaacagagaattaattaattgcacaactttcttattgctagtaaactcagatgtaagtttgtcctccttttcacgtagcactaaagccttaactgccaagagacttaagcctgccctctctctagcaggtgaagatcctcctgatgaagctataaaatctttcattgactttgctttacttccagccctagtcaagaggtaaaaaaaatttaaggaagaggctagatatattgttgagcagcaatctttctgaatgatagaacaagactcttatgttgttgaactataaaaacttgcatttgacaaatatgtgctgtgccaaatagagaaggggaactttgcaaccagagaaatagaatgcaacatcattgagtagaacctttcagtagttcacaaaaagcggcaggaaaacgggacaacagaatgcaaaaatatatgcaaaacaattacaacttactcaacagctatagccaattgctttagcacagatgatggaggaatggggtctttagttgcagcagttaggccttcaactgagggaattgcttctgaagcctgaatcaaagtttttactcatacatcattaaagcaacccatatgtgtaattgaattggcaaatcaataagatactcatttatataattgataggcaaatcaataagaaatctcaattgtatcttcaaagattttactggaaagagggacaccatgagatacctaataagcatgcattaccaatttatcacaagcataccaagcattgctaacttactagacaaaggatgatgacacaatctgacagactattttgaaaacaaaatgctcatagtcagcatacattatcagcttttgctaacatcctcctcacttaacttcctggtttagagacttcaatcatacgcacacagttggaagatgaatccttgagttaaaatgtttcagattttcttaccttggcctcgagatcattctttacattcaggaggtacaaattatcatcataaaatggaatggccatgcttgcatccccaactttatctgtatcttcaacttcttttctccctctccggatgttctttattttatcttgccaatcctgctttattcctaaatgtggaggcctccactttatatgcttcgattcactatgaagctgcaccatcccattacaaagaccaattgtgtaagtaattacaggacaaatgtcacgtaataaatacctagacataaacgcaaacaaaaacatataaacagttttcgatcatctttaagccaagactcatttcgaaattataactattcactttgcaggactcctgcaaatattttcacaattaattgtgattttttttttttttgaggaagtcattgagggaacgaatccaataagaaaccaaacaatgaatttcaacaccctgatctaaatttcccttcccttattaacgtcaaattagaaactcacgaaacaaatatacttttgtttgataatcaaatacagctcccggaagtgcatatacgttgggaataaaaacaaaaacaaaaatgcaacaaaacaaaacaaaaacaaatcgaacctcggtaggattgaaatagttaaattcaatgtgtcctcttccaaatcaataattgccattaccttggagtcgttttcgtcggtgtgaggagattcagcttctggttgttggccagtgaaggtgttgggcgacgactgcttatcgtgatcttcttcacggtcaacaaattgagtcaatgctaattccgaaaacaataataataataataattatttttattttattttataaatttattttttgtttgaatctccctaaaagagaaagggagaagaaaaaaaaacaaaaaaaatgcacatccgttcggaatataaggagaaaaaggaaaaccaaaaatagagagatagtgattgatgtggcgcgaggagaacctcgatcggatttgaaatccaagagaacgcgctccgctttggccgcggcggaatgaaaggcggttctcgctttggacacaaaagtgtgctgctcctcctccatttcctgcgcacgttaagccacaacacgcgaagatgaggtcaggattgaaacgctgagactcatgccatgccaagactagatggactggaactggaagaagaccaacacggtttcataattgatatcaactagtataagtagtagcggaacatcacaaattcactctcctctgcactcaaataacccaaaccaaaacggggatcgaagtaataatattggtccgttccgttatatactacgagtccgtggcaattgccaactgcattaaatcactctgcccggtcttttaagggtggatttagtagagaaaatgaaaaaaaataaattagtaaattagtatgaattttagacctttattactttttcttcttctttcctttctactaaacccatcctaaattcgttttctcgaaatgcatgccggtctgtcctttcctgcagtccaaacttgtgctaccatacatgataaagaaaaaacaaaacaagcattcacggttgagtagaatggattagattgtctgtatttgggcaataaaattgattttgaatttatatgtttaatgtttaaatatttttattataagatcaatttattatgagtaaaatttaatataaaattttgggtcaaatataaattttgaaaataatccatatattatcacttttaataatgtatcatatatataagggatagtctttatacaccaacccaaaatctaatacatcattcaaaaattttaaatgccaaaagtatccttgtgttaaggttcttacggattcatcgattcgtaagtaagtttttcttttaaaaaaagttaaaatatatatttttaaataataacacatgcaactcttgaacttacaacctccatgttattaatacgatattccaaccaactaagctaataaatcaattatgtttaaaaataattattgttgtttatattaattatccaaccaaccccgtcatgcaggatccctattccaaaaaaattacataattattcttatattaatttttattttatattctaaatattaaaatattaaaggttgattttatattttacttatattagaatttaaaattaatgttttaaattgttggtgagacatttgaagtttttttttttaaaatttacttgtatcaaaatttaaaattaatattttttttaaaattttggagcagactacgaggaccagggtgaacgaacgaacatagtgacagtggaaaaagattgcccatgacgaggatcggggacggagacttaggctttgtttgagagttaggaggggaagagaaagaaagagatttaaggggaagtgagaggaaggaaaaggaggaaaatgagagaaatttttttctccttatttgggagttaaaaatatattaagagagggaaattcagagttaataagatatttttacaattttactcttacttcaaaaattaatacactctatattttacaaataaaacttaattttaaaatgactgaatgataataataattttattatttttccttctaaaaatttcaaattgggagaataacaatttttaagctttggaagttttcagaggagttttaaaaatcttcaaatctttttcctcaaaaattaaaactctcaaagaaaaaaatgtcatcacttaaatcttttatttttttctcttcccttttaaaatccatctctcaaacaaagtctcaaattaattggaggacggggatgagcagcgggggagtagtcacccgccttgccccattaacgtctctagttatcctcacatcagtcattattgaagtgacttgtaaaaagattatttaaaaaaaaaaaaattgtgaaaaacaacactaacatacagttatggaaggtttgtataatttggatgagattgtaagttgaaatcttgtcatcataaaaaaccagaaagacaaaaatcaatgaagccatatgtataacaaaaacagagaatgaacagtgacaaaggcagggaacataatagacaaggacagtgaaaacagtgagggaacgcagggaacatagtaaacaaaaacagggaatagagaacagtgacaaaggcaaaacctgagactgggaaaatcagagagatgaacatgcagagcctgaggtgaaagtccagtcgccagcaagttgctgaagaaggaaccgtaaattgccagaggaaaccgccggaagatgctgggctttttagatatcccttttctgatttctcggagacaacaaaagtgtcctttacaaaacgccctggaccaccatgttgatgttgtcatgatcctgcagccaccatttgccaccacaaggaatcctcaactccaagtgtcccacacagtgatttgctggatttctgccacgccttggcagggtggcactgccctgctgccattgtggctgtttaacaacacttattcatatttattttttcattgcaatttgtttttggaatgttaaacaatactggatattttattattgcacaatgcatatctttctactgtaggatatttaatgtgtatctttggagaaaaacccgatgaaaccactctggagcaacttgtagattgggaatacacagtatgttgccgtttgcacttggtcaagtgatttacataattaatgttatattctgatggtagtcatttcaattacagttttgtgatacagatggagagacaaaaaaaatacttttatagaacgccaaagacacgagaattggacagtctgctgggagatatccaccataaaattctaggtattttaagcatacatttgatagttccctattgttatttatttatttactttgaagtaagtagctgagcctttgcccagacttgtaacatgctctaaccttgaaatggaaaaactccacttaaaatccagttgaatgccaatccatgactttggtttagtcatgttgaggtacattggaaagcgggataatggagaaacaggcacactctataaagatgcaatattacgtgtagagttgtaagaaattagagtttaataaaaaaatatgaaattccttgacacagcttatgtgttataagagctatgtgatgtaggtagttattttcttcctaaattcaaattataacacttggtctctggtgcaaatcttacttatttgcgaattcttttattcaagatatggagagggcgatcaccagagacttgttttcacgtatatttttgttccaaacccatttgataaaggtggcaacttttgcagctgaactggactggtaagataaattttgtcattataataactggtgcttgctcagacatttttttatcattgataattttatttcagctttttgtcaatggccactgattttttattcaacggctacaagatctacaattccgtgagcttgggcttctgttgctgacataaaaacatccctttccatgtcttcggatataacccataaaggtttgccttgagtcgggcggaaaaaaaaggggggtatgttgactgaagaaaatttgcttgatataaaaaatggaaggttcaaaccatcaagtttataagaacctcttggaaatggagaatcattgatatggttaatgataaaaactggttttgtttggaggcatgttttgcaggaaatgactgtagacacatttattcctaatgacactaagattcttcatgatggtaaatagatgtagacatacataactgataattgctaacttatatcattgaaatccattttgatgacattatattgttattaatccctgttccgttgttctttacattaggaagaattaatatcatcactggtcctaatttttctggaaaaagtatctatctaaagcaggtcagttattagttctttatctttctggtatatgtattctgtatgattttgatcatactgttttaaatagcaattatgttgaaaaggtcattctatgacattaccttctagtctccaaaaagaatgtttctaaattctagtctctaaatgaaaaaagtgttgcagaactattctttagcagtacgtgtaccacgttatcaacttctggttgttaatattcatctggtctgacaacctacaaactacaattgataatatttatctggtctgtcttgatttgggttttgcatgtttttattttttgatattcactcgtaacaattttttctgttatccaattgaaaaagaatttaattaccatgtatttttgggataaaaattactttatattattattatttaataacatattattatattatttgataaatacaagaatatatcaaatttactacatgacaattggcatcacaatttaataataatataaatttattgtactcaatattaaagtaaacaatttttaatatttcttatattatcttgtttttgtatgattacctgacggtaaaatgacagactataaataaattaaaaatcttaacatttttattgttttatgtgatgagctcttgtttatccacctttccagcgcaaaggatttttgtgagggactgtcttgaagactaaaaattattaacttccacattaaagttcatcagattgttgattccttaacatacagtctaatgtgtggctattacatgatgctacaaccttgctccttgttgctctatgatcataatgtaatgagaagtattttgcaggttgctataattgtttttctctcccacattggcagttttgtgccagctgatgcagcaactgtgggtctgacagataggtatcattttcttatgaatcgtgtcctttgtgaaatgggagttacattgttgtatgctgatcttagttttacaattgtaattttttttttcctttggtggggaggggggaatattttctgcaacaggaagccggcttatgacagctgaacaatcaacatttatgattgatctacatcaaatagggatgatgctcaggtataccaagataaaggcaaataaggatatcttcaatacattgactatatatcgatcataggcaaaatctgtataatctcccagtatttggactatcatgcaggatgctcctgtcttccatattactcacttatttggtttaattaatcatttggtctctatatccatgccaacctttcgtttaagtccctatacctaaaaactttacatttagtccctatacaaggaatttttttaagttttagtcttatgcctccattttgtgacggttttacactaccagaaaacgaacaacatgaattaaaacataaaaaacttgttcgaatagggactaaaacagagaattttttatacggacaatttttaggtagagactaaaatgaaaagttgatgcatgtataaagatcaaataattaattaaacccacttgttttataattgcagatgtttttctgaatggttttatctgaacaattaaatagatgtagggttccaggagatttgtagtttattaaaagaagagtgtgtgtataactgtatatgtgtgtgtgtgtgggttgggtgtgttaattttttcttttaatgttgaggaaacctgcaggcatgctacttcacgttctctgtgtctggtggatgaatttggtaaaggcactcttacagaaggtctgttaatccaatgtttattaagtgtctaaatcataaatacatggaatgtgtgtgtactgcagatgctagtttttaccataaatgttttgatcttcctttgaaaatgatgtgtgtggtttttggaatcctgcagggctgcactgtgcactgcttgctggtaatttacaaaactgctgtttaaaaatgaaaagagtacactacgcatattgttctttctttccttttagctgataacaaaaatgtataaagcatattttatgttctgctcttatttattttattagaacaagctgtacggttcatgcaggtgtaccagaggaaatcataaaaagagcaacagctgtgttggataccgtttcaaataataaacatgttgagcggttatgcaatgagaacatctctgcttaagatcgtcaatacaaggtgtcatatcaattttcaagaaccaaattacagctttggatattgtttactctctcagagacatgttaaattatatttctgaatggaatgcaggatgccatggagaaattgttggaatatgatattgacaaaggcgacttaaaacttttctttgaggatgtattttctctagttcttaatgcatcgtgactgaactgaagtcttctgctggttgttttcgtaggaattattgagatgccatatgtgatcatgacatttatgtcaagacgagttgaatccatgttttattttaagtcttttacaaacttaaggtccattttggtaaatagtttaattagagacttacagaataatatttattatgtataagttgtttttatattgaagagaaaattaagttgaagttcatttcatattattttgaagaatttattgaaataaaaaaataaaaagaacttatgaacatatcataataagttcaaataaatttaaaataagtttcttgtaagtggttctttatattgctaaattatcaagcatcctagttactattagtttcctcgaagatttctctttgcatactgacccaaccgttgcgacatctactttagggtggataccacctgggttaggttggatcaaagttaatgttgatgctgctgttagaatgtctgataacgaggctgtttgcggaggagttctgcgtgatcattatggtgtctttttgcatggttttatggcaaacattggaacttgttatgtcctagaagccaaactttgggctatcctcaatggccttcagctagctttggatagaggttactcgcacgtcttagtggaatcagatgcggctgaacctgttcgtctctgctctactttgtctcttattagagcctgtttggatacaaggttagaagtaattttgagagtttttctactgaaaaaaacactatatttccattagagaagttcttaaaaacacttctaacttgtatccaaacagacccttggtcatcctcttctcgagagagtgcaaaccattcagaggatgtccagaattcccgtgggttgctgtttcagaagcgtgtttagagaacacaaccgggttgctgatgagatggctaagagagttttctctcttcagctttgttttctgcttttaatgttgctcctgcgtttatttcctctttgctgcgtgttgatgcagctggtctgtctgttccttagtttctgctttcttgggctttagccccttttatccagcaaaaaaataaatatattatcaagcaactttaaaatgatttaaacattaactcgtttttctcagctaaaaatccacaattaattgttgcccttgctcataatattttttagaaaattctaataattttgattattaatatgttttaccaccgtttctctttcctttccttctttcggtttgtcacagcttggattcacatcaactcttgaccttgaatcagttggatcttgtcaccttatcaacataagttatcagttatcactatagctacttggtcagataacataaatgatagtgttgttgatcatttcatcggtgcaattaaacgagtaataaaaaacaacaactttcttacacgaatgcatcttgtcatggatacaccttcatctcatgttatgccaaattgccaatcttagtatatatcatctacttcaagtaaaataatacacttggctagccagtgatcacttttcatgaagcctaaatagattactctacggggtaacaaatctagtagtatttttttcgtcccaacaccacacacttggcatttgatattgagttagataaaaaaaatgtcattgaagggataaaatcaatcgtcaacttcagttaggcagctactagctgtctcatattaatgggagatgtgtaagttgaagggccatcaaaaagtttattaacaaatagacgagcagctgcctccgtaggatggaattggtcaaagaagatgtgatcttgtctgttaggacaaaggtttgacaatggcaggcagggagctctggcattcagctctcccagtccacaacaagcaccttttacctcactaaatcctgaaagtgatttaaacttattttaattagaatccaactttataaaaacaaaagagtaaatagccaatttatttcctgaatttctatcttactatcattttagtcttgaaattaagaaaaacttaaataagtctttgaaataaacctatttttttttcttttcattttggtctctagtatgggtaacttaagtgatactactaataacaacataattttagaaacaaaaatgagaattttttttttagagacccaagtgaaacattaaaaacactcacgaacttatttgagtttttctttacttttaggattaaaactataacgaaatgcaaatttagagaataaatattggtcatttactcaaaacaaaactaataaacatggtttggtagaggaaagaaatatggaagaaagaaataaaagagaaaaaaagtgaataaatttttaagttgtttgaattaaaaggataaaaaaataaaagagaaggaagtttcttaataaagaaacgaaaagaaagaaaataatatttggatatgttattgtataaaaatagtaccgtaggaagctggagtctgaataaggtcgttgatggcagcaaaagtgtcaaaataggagtagattatgcttccattctccgattgccattccttcaacatggactgaaggccttcattatattttaccgccatgtcattggcttctataaagcattccgttttgttcttcagcctgaaatcagggcagcatccaagtgtcccaactcccgcaatctcaaatttgcgagcaccatgatcgtataatcgctgcaaaaaaaataaaaaataaaaaataaaaaaagttaccgaaaaaaaagaagacaaagtaaatgacacacgagttgaccctctaagcacaatagaacatttacgagaaagtaacatgcatgcaaatagggtgcatgtattggaaccccggcccgcaatataattattaagtcaacggtacaatttttttgaagtttgatgtgatgggtaggtaaaagtaaagcaagtctatctattgatcagtgattaatgaagatttgtagcatagtaacttgattataatcatgttcatgtgatgttatgtgttacctgtagttgcacttttagtgagaaagccatggaatccacatactgttgcggggtgcttttcttacgaagatccgatgattcaaagtatccaaatatatcattgctgccaatcaccacaacgaagattgattttgagagatgcttctgtagaccagctgctcctcctacttctcgagtcatttcctcatgcacaattgagtagtagtccacttgtttcctcaacggtattgattgtctcttaaatgatatataataatatatattgttattaagtacactattatgccaacaatatatagaataaggggtggctcagttgggagagtaacgatttttatggaacattatatatagagagggaattcacttaatttaagagtagaattacttttctgttgattttcttaaaatctaataattaagattatgaataatgaaaataaagaataactctaaaagagttagttttaaagtaagtgaattcctcctttatatatatatatatatatatatatatatatataatatgatgagtaataataaaggtataccttaatttggggtttattagagccaaaaaagaaaaagaaaaaaaaaatagaaagggtagatagagaaaataataattacaataaataattaatgaataaagaaaataggattaaaatgatataaagaagaaagtgaatatatatgatcattcatttttaataatgtgcctaaggggcttttggtagatgaaaaatatttatttttgaaggaatcttaaagtgacaaattgtgatttttatgtttggaatgtaattaataaaaaagtttgtcaagaaattatgatttctgaaaatcaattttaactcattttttcgcaaaaaacattcccaatgaggggtaggaatacaactaatttcttgattagaggaaaacttttaattacttattttacatgaatctttaattttcaggaaacatattaaaactaactaaacgtattttacacatttctaagaattatgattcctagcaatcgactttcctaaaaattatgtaccacccgttgggttggattagttatgcatgtgacctggtgtgtttcaatctgactcggcatgacttgttctcgaatcagtgactcgaacttgacgtgtcatgcatattttagttttttttcccaatcgaacaacatcacttatattagaaaatttaatttataccttacatttgtattatttataaatttgcttatatttttttaccaagcataaccgcatgttaaaatttgagtgataaaattattaccatttttaaattttccttgactaatttgtgtgtattaaattctaatttaaggttgtttatatatattgaattatgaaaaaaatatgttacatgctcaaaattttaaataaattcataactatatttttaaatataataaattttattaaattttaaatcttaaatgtacaagcttacatgttatgaaattattttaatttttttaaaatataaatcggatcatgcaagtaaacagataactcattagatcaatatctaacttagtaactaaatatcgaatgagttaataattagtccgaatctaataacattggttgagaggtgatccaaaacatccaggctcatcttgggtcagattcctatatccctatttaatttggcccatatattgcataaacagaataaataaataaataaatttaaaaaaagcctggaggtaataaaaaattaaagggaaagagggaactacatttggtcacttacataacgttcgtctgtaccatcaaatattccagcacctgcagaggcaaagctaacaccatccatgaacgatgcattgtttttgttggcctttgatgttataagggacaggtaaggtggtgaagttggcaaacccaatttctcagctgcaacccacacaatcattctattaaaaaatgtctctatattctatacaactgtttgaagtggcatattaatagctagagtgaatttggattcacttaccaacaaaatctgcagcattcttgccgttgctaaatctcccagttggtttgtgtgtaggaaaatcaacaccatagtgacgatgatttgccttagcaatggaaagagtcaagtaattgttgttgcccacgtcaacaagtgagtctccaaacacataaacggcagaaaccatttcagcctttgaggaaccaaagctgaataagacgaagaaggcatggacaataaggaaagctcttttacccatcttggtgggtttgtttgtgtgtgctccaaattgtttttggtttagggtgtctttggaggtagacaactgttagatgattgatatttaaagataccacaaagctggatgaaaggtacacgttacgtgtgaaaagataaatttgattgaatgctagtgagagatagtggagcaaagagtattttccagatactccatccacttattttattgtcaatatgatgtgtcatatgttaatgggacaaacattgtcaacatcaaaagtaaaattcttaaacttgttgccttggtttttagtgttaattccctcaacaactaaactgtgacaaagttaagtaggcctgtttttgataattacccaactagctaggcacaactctaactcttaattaaatttagttagtttaatttataattaatctgatcgatgttgctgattaatgaaccttcgaaggcacagatcaatacatcatacatgcatcacgtggcaccctatatctaattgaatgaccaaaaaaacatttttagtggtagatcttaaattaggattttagaccactttttagtggaccctatagtaccacataggattatagatttctcaaaatttctctaattttttcctttaatggtagatctcattttgagatcttagggagagagaaagagagagaaaatttattcttttttgaacaatgtgcagatcttgagggatcttttacaagaactcattctccatgttggagatctctccatttcctttattgggagatcttgtgaagatcagatcttgagtttaagatctttacttaagatctaccactaaagatgctctgatgaacttcgaaaataattactatatagtatatgttgctcaactgttctttatgatttaataaagtagatgggttgtatataaagctagcagaggtagccacatcaaaatacgcaacatccgacaagtaaaagcctcattcagctcaaagtaaaaggttctatatatatatatatatatatatatatatatatatatatatatacacttttatataaataattaatgctttgaacttaaagcttttaaagctaggtcaaaccctcatgttcataaagtgtacagtagtacacgtttaaggtccacagtggtccccccaatattttggctttgaaagcactgctgaatatatattacataagaatttcaatttttcatgatcacacaataccaccttgacccaatggaagtcagcttgtaacatatatgcttcatcccactataaatcactccccaaattcaatccggcattcatgcatatatataaattttgatgagctaaaatagacttgtgattcgaattcattgcacttttgccgccccatatattctttccacttctctatgttcatatcatgattttgttactatagtagaaattctaaggaaacgaggagcttaataaagttcctttcattccaattcatctttgtgtggcatttgataaaagacactgaagacagttttctgaacccaaatctttttaagccagaacttcgacaatatcagaatctttggttggattaataaaatttaatagatacagaaaaatatattgaaataagtaactttattaaaaattattcttaaaataatttgatctatcttgaaatgtgtgtatatgtgcgtgcatgtgagagataatttaatttatgtaaacatctatttctaactaatatggtttaatcattttcctacgtcataagtcttatgatgtaacaataaaatcaatattcaatagatgccagtgtaaaaataacaatatataaattaaaccctctcactctgtgtatatattccacagacctccattccatgatccctttacaatttaaggagagaaaaaaaacaccattctctgacattcaaggggaaaaaatatagtaagtgatatgtgatttattcgtcttcacatgttgtaaatccgttcaaataaaatattacattttaggagcttcactaacaatttgacagagaaataattaatatttattggacgcaaaaggactagcatttagcaagaagggtacaatattcacacatagacacactttttaaagcttttttttttttggtccaaatagaaactattgcttattttcttaaaaatatttaattatgtgcaacttttaaaaaaattattcaattgaaaatatttaaggaaacacaaacaaacagtgcattgagttcgtgaaaagaatcgatagggcaacccatcataatgttccacaaccacacaagagaccatgaccgtcccgacgtacgcatttacggtggctccgctcaagttacgttttgttttcagactctttcaagttttcaacgtcacacacaacatacatcatttccccacactttgaaacttaacatttttttttcttagacccctttatttatataatcatttctttggtttacaaaaaaaaaaaaaaactttatatataccacttaaaagcccgtttatctaaataggaacaactttttttctttaatccgattttttttttttttgccgccagttattaaaaaagtaatctctcaaggtattataaatctacttatggacttgacatcttctaacacatgtttttcttgtaagcaccagtctaaaattaaaccctaatcacatatttaaatgttaaccatgtcacactacatgcacacaactatttttcgaagttcatgtagctttgtacgttcatcatctaggctttcaagaagaatacactacaatttttcctacttaacaggttctagtaaggcttaagtagtaacccgccaaaaaactaacgagtagagacatatacttacggtcaatcacacgactcacggttaactattacattgtacatactcgtacaaatatacgtactactattatattgacattttggcgttctttaattctgtgcctgcttcttgaatcatgattgagatttgagacaaatatatatatgaggacatagattacaaactcggctgaagtttcgaaatgagaaaggaataatctatgaaataaaaggatgtcatacattcatacaatgaatccatgtagttagacagagattggacagtttaaattttaagtttgatataaaatataacttgtttaaccattcacgattgtgattgattgaatatgtcaaattcttgactgtaggaaatccgaatctgaaataaaaattagaaagaggtcacaaagatttggacaagtacccttacgggagtacatcatcaagcatgaaaaccaaaagtgagattattttaactcaattacaaggcacttgtttaagtgttttttgtttttttttttttttaagaaatcaaaatataagagtgaaaatatgtttacttaaaatttaaaaaatattttcaaaaactgacctaaaactgaaaacaacaaatcaatattttctacatttttttaaagaagtgaaaatttaatgatatcttaaaatagttttttcttgatatatgttttttaaatcttgaaaatttgaaaatgaaaataaaaaataaacactcaaaaccaagtacattttagttgtcttaaatttaagttttaaatatgtacttatatttgtgcaaaaaatagaattatgtagttgtattaaatattctgatattttaaaaaaatgatacacaaaaatatttcttaattcttgaattgctcttgatgattttatcccaatcccaatttcctgattaataatgcatttgtggggaattaagtgattatgaaggttgttgagggagagggagagtttgtgattaatatagaggtgtttggttgttccataagaagaaggaagcttgatcgatgggttgcaccgacagctccctctcaccaacgctgcaacagcagctccccagcggatgaggattgggatgaggattgggtttgtgttggaagtagaggagatggacttttatgggtttgaaaaaaaatgacattaattaatagtgttagaggaggccaaagtaatgtaaaatgagagagaaaatgcatgtgaaatttgagtaaaattcaaggaaagttcaataatttgctcttaataaaattcacaagtagtttgattgcattagttgtggaacaaagaaatataattaatattcggaggccaacactatgagacttgtcaaacaaaagtttttttttttaagtgaaaaacaagagtttgcctatcaatatataaatagacaataaattatttttgttactaactaacttaatgaataattgataatgtttataaaaaaatacaggtatatcagaataaaacaaaataaaaagtttcacaaaaatattgagttattattatgaacttgttttcgtggttgatttttgtattgtgtgttgtaggtaaaattccttatagtcacttattttaatatttatgtgatttacatgagaaataaaaagtctgaaagctttgagacaaaaaaaataataaaaaagaaaaaacaaaagcctgtaatcaaaagaacatgcatgtcgagttaaaaaggagaatcaataacttgtatgcaacccctttttaaagcttgcaaatatacatgcataatttaaatttggattaaatatcttttgttattgcaatttaatgtatttctttaattttttgccttgtattttttaaaattttaattcttacaaattatgcttattttattttgtatctttaaagtaatttatataactctttgaacagtaaaaaatattatctaaaccacttaaaaatgaaaaaaaaatcataatttataaggatcgaaaacatttttttaacggcaacaaaaaaaatgctaaattaacattactaaaaaatgatttaaacctttaaattttaaaacacatatcaaagcgttaccctacggaatttattaaaaagacttaaaaaagtattattcaatgaattgaagggaataagatattcatcaagattatgtattcctatttaaatcctggaaagagagacaaaaattaagtaaagtcaattaatagatgcaaaagttggacaaaggagtactaactcactccaatttcatgaacctaataatcatcacaaaatagattaagaaaatcatcataaactttcctttaaaattctccattgtaataactaaaaaatctgcattactataggagtattttattccctcactctagtacagtagtcattaatccaatttgtcatattaattaattaattaacttttaagttgaggtgagatttacttgctgtaagaggtgatagttggtgaaaataagggggaaatgacaaaaagatgcgaacaacaggcatagaggcatgcgagggacggtttcgggcacgggcagcagatgccgtcattcccagcctgtcacgcggtttcacacacacaaaataagaaaacgtttattggtattaattgtatttactagtttattcattattaattatagtaataaaggaagaaagagaaagaaatgaaagaaataggaaaaattagacactcaaagtcacgcaacttacctcactcatcgtaatccgaagctgaggtccgagtggtaacaatcaggctcgagcctcactgagcttctcgaaaaagccaatgcaatagtcattaatccaatttgtcatgttaattaattttaagttgaggtgggatttacatgcctcaagaggtgatagttggtgaaaaaataaggagaaaatgacaaagagatatgggtaacaggcaaagaggtatgcaaaggagggttcaagccatgagtagcaaaagatgtcgtcattcctagccagtaacgccatttcacacacaaaataagaaaacatttattgatattaattgtctttactagtttattcattattaattatagtaataaaggaagaaagagaaagaaatgaaataaatagggaaaactagacactaaagtcacgcaacttacctcacccatcgtaatctgaagctgaggttcgagtggtgacagtcaggctcggacctcactgagcttctcgagaaaagccaatgcagtagtcattaatccaatttgtcatgttaattaattaattaattaatttttaagttgaggtgggatttacatgctgcaagaggtgatagttggtgaaaataaggaggaaatgacaaagatatgggcagcaggcaaaaaggtatgcaaaggagggttcaggccatgagtagcaaaagatgtcgtcattcctagccagtaacgccatttcacacacacaaaataagaaaaaatttattgaaattaattgtatttactagtttatttattattaattgtagtaataaaggaagaaagagaaagaaatgaaggaaatagtgggaactagacactcaaagtcatgcagcttacctcacccaccctaatccaaagctgaggtccgagtggtgacagctaggttaggacctcacatgcaccattgaaaataatggagcctcccaaagcaaaccaagagagagaaactcaaatagggttttagggagagatataaagagagtgagagtaagaatgcaacaacaacaacaacaacaacaaatgatggatcagatcgtaacgaagaagaagagggggcgtccctccaaggcagatctggcttgccgttccgacaaatctttggccacctcgcaaccagacctccgacggagtcttcgtcgccgtcggaatgtgtgctacaacattgactacctcaacgaggaggacgaggaccaggaagaggacgagaagaggcacaagaagaagttaaagctcattgtgaagctcaacaacaatgaagaagacaatgatgaggatgactatgagccgagtcgcaaaggggagcgtggggtgcacgcatcatatgaaaagggggaagaagaagaagaagaaaaagggaatgaggaagcgaatgagtatgaagaagagcgtgaggtaacgaaacaaagtgttgaaaatttgagacaatgtctacctcatttttttggtaccaattggtccataattgaattatgtttactatctctctctttgtgtcgggaatttgggggaaataagtaactaacgggtcaactataaaaaactaacacatacatccagactctctggttgtgtttgcttccattttattaacccccatctctctctatgactataaattagataacctaggacccattgttgtttgtctctgtctctgtctccattgcatatttttattacataaacacaatatttgccttttttttttggttttgggttatgttatttattttgtgtgtatgggtttcttgtgataggtaaagggcataaaagtggattctaaagggctttactctattccaggtttgtgtgtgtgttttgttgttttggttgtaatgtaattcgtaattcttaattacataatttcttactttttttaaaaaaatgtaccatgttggatactgaaacaggtgtgccattgtttcttttattgcattgttctcttgagtttcttaactaggttctttattttgtttttgtttctagtgttaggaactccatcaaagcttccaccttggatttcgttgcctgacaagaggaccttggagtttatccttgacaagcttcaaaagtaaggcgattttgtttcccattttctttcttcatgcattcctgttggttttaattgtggtgaatgatttgtataacatcttcaatcttcaacttttattgttgcatggcgatgccatgtcttttggtgaattgacaggaaagatacatatggtgtgtatgcggagccagtggatccgaaagaggtatgagggcttttcttcctgttaattgttaatcttgcttttggaaggcaatctaagatgaaagttcaaattatgtttgaatgcagcttcctgattatcacaaagtgattgagcatccgatggactttgccacagtgaggaagaagttggcaaatggatcttattctaccttggaacaatttgaggtgtgtaaatgtgtcagttgttactgttgaagttggggatgttccttttcttttctgagattttggttatttttgcaatatgattatgtgggttgtgagcaagaggttgttgcatgctatttatgtgaggggaaacatttaaatggcttacttgtcagtataatagagtttgtcaagatttattcacttatgttgataatggaattgtgtaggcaatagtgatttggatgtttttgattgaaactagtggggaacttttgcgggagtatactatttataggaatcatatgaaatttagcataagttatatgtaccttgtttttttcccttgaggagtatgattttcgaaccttgtgcatttttttatcaacaaataaacgatttcattgatcaaagagatataagatataccataagtaaataatctaaagaaaagaaacatccaagtggctatctagttggttatgtcatatttggacgaatgattacccaatatttcataaccaactttcagtttctgtaaaacttatccccttgctcgagaaaaatctctcaaacacctttcctatatgatcatcccaaacatgcatacacattgctagcccattgttgtaatgagtatgagagtttagtgggtggatgtttcaaccatgtccaacttacatatatgacctcctataggattttctttgaattaaaaatgccattgttgaagatcatgttattacgggatctccatgtacaccacaacaatgcacaccatataaagactcattttgttgttgcctccttcaaagaaataaccactccactgttgagatatccttccacttataacatagtacccaccaccactgagcccttggactgagaaataacaaatgttcaattgacttcaatttctctaagcaaatagggcatgatgcttcttcctttactatatagccacacatctctttttaacaggttgggccttgttggtaatctgtccaacatggcctccatatcatcactacaactttcggtggtaaattggtgttccatataaatctccatatgtcatctgattggtcattgccattgtctacctgcaatgatttgtaggtagactttgttgaatatattccttttgcctcaataggccattcccacctgtctggttggtctctttgcatcgacatcgaattcaagttttgatataattgttctagagagggtttctcctaatcaaagcactctctatgccactcgaacgtccactcccaaacctcacccccatcttccaacacttgcaacaatcctatcttgttggttagaaatatggaagagcctaggatacttattagctaatgactcacgacctaaccatgtatccctctaaaatctagtatttttcctatctcccaccctccatctcactatactatcaaaccaattacctttcttcccacccctacacccttttttaatgttcctccaccaaatcgaatattctcttaaagaattatcattgagtaaatattttcatgctctgtaatttgactccatcacattgctccacaacatgcctttttggtggtataacttgcacctccattttgctagtaatgctacattaaaagtaccaaggtaccttacccccaaacctcctttatttttatctctacatatctcatcccatttcacttaagatattttcctatcaccttcccctccatcccaaaggaaccttctttgtatggacatattttttttcaatacaccacatgggatcttaaataaggaaaagaagtaaagcggtaatgatgaaaaaacaaaattaattaagcacactctatctgtcattgagaggatcttatggctccacccactagtttcttctcatacttttccacaataggtctccaagtcgcttgtcttcttggattagcgccaattgacatgtcgaggtacacaaggaactctcaagaacctacaattcaagatatccgcaaatctctccacttcaactcttggcaagcctaaagctccaaagcaactcatggaaaaattgactttcaagcctgatactaactcaagatctcaagatgctcttgatgtcaattacattgttcaattttgtttctcccaaaaacaataggttgacctccaccttgtctttaccaattagagacccatttttaaagcttccatcatcaatcaattcaacccttatgccactacaagaaagagaaatggttccattggatccctttgtcaaagacccctttgcatcttgaaccacttgtatatccgcaaaccttgtgcattaaagcagctgctgaatatccgcaatccattcaaacgttgtgcattaggctaccccttattatcatctgaaccatttttaaaccgtacatagtatattgtcttcctgatttagtgattttgaaaggcaaataaatgatttgaatgcaactgttgaatgcagagtgatgtatttttgatttcctcaaatgcaatgcaatacaatgtggcggagaccatataccacaaacaggtataaaattgactgctttcccttgaaaaattaacgcaagtagcaattttgttgtgcttgctgtatgatccctatatatttgttacaggcacgatcaatacaagaactagcaaggaaaaagtttgaaaagttaaggattgattctgaacgttctcaaagtgagctgaagtctgaacaaaaaaggagatctaattcccttgttaagaagctagaaaagaggccgctgggtcatgcttcacaggaacctgttggctttgattttacctcaggtgcaactcgtgctactattggtgatgtactgccaacttcccttccaatgcaaggtgttgtatgtgaaaggcctggcaatattgatgcccttctggaggggaatgctttattgattgatgcaaatcaagagaaagcagaaaactatatatcaggtatcacagaagaaatgtctatttcatgctatgatacacagaaacaatactgtatcggatacaatgatacgattattttaaaaatatatataatacattacgtgtaagatacatatataaaattcataaacatgataaatatataattataattttgcaaactaaattataagcatacttcttgaacattagtaaaaaaaattattgtacaaattctgaattgatgagaaacttgcattccatttaatttaattgaaattcccttacatgtctctaatgaaaaataaaattataaatgattgcatgtcattataaattactttctattattttgaatataggaacaatactatgaatcttattcctttcttaaaatcatacataaagagaacaatttttatttttggttcattaagggaaagtgtttctatattatacacgcttacatgtttcttgtagttgtattggactttcataaaatgctttaaaagcttggatacttcaccactaagtatatcggtaaagtatagaaagagtatcgatattagatatgtgaagcaaattaaactattaattgttggtgctttatagatttggatacttcttcggtatgtatcgatgaagtattttagagtattggtatcggatatggatacgtgaaacaaattgaagtatatgtgcttcatagatttcatgccttcgttgttcaactttgcatactctcagttggatattactgtcattatctagctgttcgcttttgactgttactttattgtttcagggagggatctgctctccaagttggaaaggaaaccatctgtgcaagataatatgtctaatctaccagctactagatcggattccatatttacaacatttgagggtgaagttaagccacggctagttagtgtatgtatcaaaaggagtgaattgttatttctaatccttgaatagtttagctttcttgtttaaagcattaatgttgtatttttcggcaccaggttggaccacaagatgaatattcatatgccaggagtttggctcgttttgctgcaactctgggacctactgcatggaaagttgcttcccagaagattcagcaggcactgccatctggctgtaaatttggtcgtggttgggttggagagtatgaaccacttccaaccccagtattaatgcttaataatcatgcccagccacaacctagtttagcgactaagttgcagtctactactgaattaatagaggttgaaacaaattgtaagaatgtggaatccaccatggaacaatattctgttaatggaccaatggatgagggaaaacagccttcagcttgttctagtagtgggcttacatcagatgaaaaatcatccttgtttggttctaatgaaccaagacccaattctcatgtcaatctcttttatcagcagctcaatgtccaaaccaggaacctcaacaattatgagaacaagggtttgaaacaagtggaattcaactctttaccctcgagtgatcagaataatgcaagtctagttgcaaagcttacaagtaataatacagctgcagcagtgtatgagcccaaagaaatggtaccaagtaacatgaatattggttcccaatctcctgtgtcacctgcaaaacaatcatctggtgtgctggttgactctcagcaaccagaccggcaactatgacatggaattattgtatttctgatgtggatgcttccacaggaatattgactggttgtggaatttcatccaaaaaccttcttgcatgcataaaaaaaaaaaattgttttccttgtgctacttttagaacagatgaaatgaataccatgtgcttgggaagattgttttcccttggatgcttatgttgggaatcttatgatggttttcttaagtaggatttgtgatcgccacagaagacttgagcagatttggcagaaaacaacttcaagactttccatcttttccagatgagaactaccgagttaatgcagcatgtctgtgttctatcctagagttgaaaccatataaaacatttaggagtcgttcatgatcaagcgttacttagatttttcaattagcgggcaataaatcctgttgatgatgctttctacattctttacaaatggttgaaattcggttgccttgatattgatttcattatgattacttgtttatctgaattgatggggaaggcatcacttgtttttagttcttaatgctgctatatttttctgtacatgtctcgaatgcaaaacctcaacttgcttttccttgtttaattttacccgactctgctagttcaacatttaagtaaaatacggtacaccccttcggaactagtgttttgggtgtttcgggtgtaaatttgtttctaggttgacataaatattatggaggttggagtagcttgtgattattagaagtatcaaactatggaaatatgaaggttgaagtggcttatgattaaaaaaagttgttcgaagattgatgcatttatttgaaacaaactaaacataaaaatggttaaattatgttcctcagttctcataaatgactttatttagttttaattttctttggaaatacgaaggttgaaatgacttatgattaattttttttttttctaagtctcatgcatttatttgaaatgagctcaatattaagatggtttaaaattatgtttcttaattagttctcataaatgactctatttcattttttattttctatttttttaaagattctaaaattgttttagttattgtaaattttaacattttcaaaatacttttatcactattttagtgacaatgtgacattaatttgttgcattacatattatctcataattattgatgctagatgatttatatctatgtcatagttaaaaaataatatgaacaaatcttaaaaaaattaaaattgataagaattaaaattaacaatttatttgaaagattaagaccaaatgaagttatttataaagattaataacttaaatcatatgaaatttgatgagtttagcttatttaaaaatacgatctaatgcggctcacgagaaacaggctcacacttgtatgtaacatgtttggttggaattacataatgtggttattcacatatattggaagatgattgacttaaatcattttttaataatttttagtcacttttaaggatagcaaagagttgtcttagacaaggatttataaaacctgattataatatattttttaaacctaaaatccgagtctaacctatttatataatatagatattttaaatatctgacctaatcttttaaaattttgacctagaaatcctaattagtaaaatctcctttgtaataaaaccttttaaagtagcttagaatcttccctttaaataatctaatgaacttaaaattatatgtaaattaattagtttaagtttttaattaaatatattagcaagacttaaaaaaaacatacaaacaagaataaaatatcaaaattaaatatcacgcacagtgaaatgttaatataattataattatgattcaaatacacagatttattatgtctgaaagattttttaaatgatttaagatttaattttttgaactaaataaaccttaaattaaaacaatagtctaacttgtttaacagatagacttaagctacgtttgtttgtttaatatggatttggcgagaagttacccattagttcattgcgttacttattcccatatcccttgtctcactctcacccctaaagtggaacttagggcttttgaaagtaattgaataaataatagctttgtcaaccgcggatttggtcagttgcatgtccctgacggtcttgatgctctgaaggagctgatttgcaagcagggaattctaatccccatcataatgtggtttatttggtgtgctaggaatccagcatttgagatgattgagagtctgtttagatataaggttagaagtctttttgagagcttctctactgaaaaaaaaaaattatatttctaataaaaaattaaagttttcaaaagaacttttaacttatatctaaacaaatcctaaacttcctgctttaaggtctcagcattggttttgggaagcaaatcaatgcacgaatcagcttcagctgttgcatgaagctcctcagactcagatgttaaaggatagtcttatggtggatgctttggggattaagtttcctagaataatgatttaggcttgttggttgttttttgttttccttttttctcgtttgtaaacaaaaaaaaaaaagtcagtttagctctctctgtcagggcattttggagtgatgaaaatgctcatgtgtaactactctatcttcatttttggcattttcaaatcctttgtaacattaatgtacattaccaactgtttctgtgacataaatacagaagaaaaatctttgatgagtatttatgatgcaataggaagaaagataaaaataaatgagataccggatgaacatttaaaatagctagatggatatatatattcactcacacaagaagcattacttaatcaagtagaaaagtcgaacagaattttccaaactcttatattgattcaatacatatactaaagagcttttaagctacaaaatcaacccgtatctttaaagtatacttcacaaggatcacaaacagggtagcatatgagagatctataagttgttaattaataactgaacattaaaaataaaagttaaaatatctttaagaatttaagattactagaggtagaatttataaatgatatagaataagctacgccgttgtacaacagatgaaagcgatcaaagaatcaaatatgaaaccaataaaacgtaaccctgtagtgttgatgggctgatggcatcatgcagaacctgagcctctctctctccattcacaagagtgatatatatatatatatatatatatatatatatatctaacaactagaagaccttttggcacgacgagcaaacgaaatccgaaggctatgtcttgatttcttgctgttagataatgtctgtggtttccccatgtttgccttcgggtttttcagaacacaaacattcccatcgcatgtgtatcttttggattcttctggtgagccctcggagaagcacccgaagatgtttgagaggtacatagctattgagaataataactaatgatcagaaatatacaatacaaatttactctcaaacgattatgtgatgccaccccgttgtgtatatatagttctggtaattgcggccactataattaatgtatggtcaaggttggcttgccgcttcaaaaatatcttttccttatttgtttatcaatatttagggtcacgcgttgccttcattcagagaaactctcacattatatggtcaaatggtttattagtatcaaaacgtgttagattattggttgcttaattttccgcgtgttcacatcttccattttaaattgcttgctttctagaactgctagtattttttttatcatatacagcttggtgcacacacacacacatatatatatatatatatatatttatatttatatatatatatatatataggagtaggaactctgcgtgacgtcgtatatatgataacaaacactgctagctgaaaagggaaatgttaacaactgaatatacttgtctaggaaataaaagtaagaaaaaattaatatttattatattgaaacataaaaatcatataaagtactccttcattaatttaaggataatggttccggagtcttcattaattttttttcagaagaaaaaaaaaacaaatgtaagatatgttttagcaacaaacacaatatgttttcgttaatgacggtaaaacaaatctgtcaaaattcgaaagaaaaaaagaaaaaaagacaaatatttgcatgccgacgactagtcaccttgcaaggggtcaaagcacgtggattgcaaacaacaaaaacaactcaactaacccatggtatgatacatcgacatcgtcaaaattgagttaaaaagacaaaagctaatgtatataggtattgggaactccaaatttaagaaatgaagttttacccactctgatcaacaggtatcgttgttcgctgaacagtgcacccgtcatattttcaattgaactagctagtattcaaatcttcatcttcagtattactggataatgatgaccataattttttgagtctattgttcaaatgcaagagtagggataagaagatgataatacataaaggactagtatagttttagatatgtgaagaatatgaagttagaattaatcagctactaaaagattattaaaaaattgtattgtttttactttgtttaatctaaacattaacatttcttgattagtttttttcacgactcttgtgattttaaatgttttctaaaaatatatgaaatcctttcaaatcttataaatacataatattatatgccatcttttaaattcttattatataaattcaataaaatttaaactataaaatcttgattataaaagtctttcttttatatcaaaataatatttttaaatctaggccaacaaacctaaatagaaaacaaatgtatcaagcttttattaatgttaatattaataattttatgcatatattaaatatatatatatatattatgaataagccaatctattaagtttaataagctatttttaaagtttaagtcttatctttttaattagaaaaactttttaaaaaagtctaagtcaaacctttttaataaataaatcagattaagccttgagccctttctacctctacttatgacttgttatggttggccaccaagtattaagcatgtactatatgcgtggtccataaaatatattacactatatgtatggtccgtaaaatatattgttaaataataaatttattttacaatagtaacaacgaacttaagtccattagagactcccaaacaacaaatttatcataggttcatgaaaactaatgaacgtttctgacaaattaagagacctaggttcatgattttagatacctatttacattctcctcaattctctattcaattaaaccccaattattcattttaattactaatcatgaaatattattttaaattaaggtaattaaattaaacacattcctcccaaaatattattttaaataattaagtgaatcaaataaattatgaaattttcaaatatctttaatttcacgaaatctattaaacataaaaaatacaaacaaattcaaaaactcttagccttttaaataatttattgagtagaataagtataaaaaacatgaataatttcaaaaactttttaagtgtgagggagatactttgatgtttaattatgcacaactttgtgaatacatgtgtgataaaattgttctatttattgcaaaaaaactacaattttttttattaatttgatatatagactttgaaatatattagttgataattgatatataattaaattatacttgaaaaattaattcaaatttttacttgacaaaaaatataataaaataaaattttaatttatattaatataatatagactttgaaatatattaattcataatttatataattaaattatacttaaaaattaattcaattttttgtttgacataattgcattagtaaattttaatagaagtagaaaataaataagtgtttacttgaataatatgatttttttaaagaattaaaattttataaaaattagtttaaaaaaatgttttcaaaaagaaaattttgaatgaatattaatgtgatatataatatatagaaattaaaattataaaatattaatttctctagataagttatacttaaaaagcaatattgatagaagaatttgatggtctgacattataaaataattttacagtattctttaattacaaatcaagttggaatgactttcaaaataattattataaaaaattaaaatttatcgtacatgataataagatatgatttaatgatattataaaagaaatttatgtaattgactattaaactattttattcatcatatatcctatgtaaaataaaaaagatattgggataaaaaaataataatttagttgaatggagcattaacaaatatattaagtataaaattcaaatacaatgttattaaaaaaaaaattccattcaagatgaaggaaaatttaaatgtatattaatacaatatttagaattagaaatatactaattttgactttatataattaaattatacttgacatgttgatagaatatttaatattattaatatagcatttatataaatattaaaacaaatacattttattatatactacgacacaattttggtatttaattataatatataaaatttattttataaaatacatttaaaaaaaagtcaaatggatattaattatcaagataagttgcttttattagaagtcaccacttagcttgatctccaacccggccaggtctcttacctccaccattgcgtcgtggccacaatgcccctacccttgttcggcaagtggaatgctttatggtctatagtcatacttattttcactaatatattttttactgcaatttcactaatattattaagacttatatttctttttttaataataagtactaagataaacacatttaaaaatttacatattaataaaagatatattatgttaaaaaaataaaacaataataaattaattccccgtgcattgcatggacttacatactagtaaaataaaaattagaacatcaaataaaaataattttggtattgtttcttcttttttttcctaatcttcttcctaatttttgggaaagctaaatatatataaactaaaaaaataaatctacaaaattttgttcttcacaataattttttttaccaacataaaaatatgccaaaaatattttataaagtatattagtaatattaattttttataagaaaaagtctaatcacgtttacaaacaatattataaaaaatacataatttaaattataaaaacgagcacataattcaaataaatcaattatttcttaaacacgttatgccttgaacaatatttgattacacattgagaaattttttcttaattttaaatttttatttataatttttgcttttaaaattattaattgttattataattatagtgtgattttaattttaaacttttgataattacagtaatatttatcaatcttaattaaaattgtattcttaaatcttaaaagtaaaattataaatccaataacaacaaaatcttatgattgattaaaattaacgtgttttatttgttttgaataaagttattattgaaaataaaatactctataactttacatcaccaaaacatatatattattttgaaatttaaattatattttctaaattcgaattacaatcttgtaaatatttcaatttcaatgcaattcaacaaaaaaattaggtagaagattataaaaaatatatatataaatataattttgcttgaaaatttcgcatcatttactaatcattggtctttaagaagacttattctcagaatacctttatatactgcggatgatttgatagtattccaattttttcgctttgattttttaaattattatatttttattagttgtaaaatttgttaggtttgtgtatactcatatataggtacagagagagagagtagagaaatgaaacctctaatatgcaacgtagatacataacaatggcaaatgaggaaaagaattcgggaggagctgtaaaaaaagaaggtgattcggttgatatatttttgaggaagggtatccgtgcctggcttacactggaacaacaaaagaatcctcacttattttcattcctccaggatgacgacactgagattttgaatagcatcctcagaagacaagaccaaagaaagagagaagaagaaagaaagagagaagaagaaggcacgtccacgaaaggtgctagcaatagcagtgctaataataatgttggagattccaagaattacaaggccatgtgaagatattaaagattcaagaaatgaagggatgtgaggtgaagtttgttggaactagctctccctagatctctgaatatctacaagcacttcagtttatctttgatccaaaaaataaactctatgcatttgtctttaagttcaaacaataactctgttgcataacaatgttatatatcctttagttgtttatgtaacaaattaaactgactcgtacttcacttatccatcaataaattcagatcattcttttcttctatatggtatcacaacctaattgcctgtgtatagggtaccactgtctgccctcctaaatccatcaccatcaatggttccggaactgatcgagaatccaaattattttttaatgttctattcaagtaaattattttttttaatctgaataatatgttattaatttcataaaatatatcttataaacaaacaacaccgtcaccactgcgttcgccacaattcccctccccttgttcagtggaatgctttgtggatgctattgccgaagacaattaccctgtgctgcatgccagattagtgaaggcatcaaaggtccttgcatacgtttatcaatccatcacgatgataatgaatcatatttatctcaaatacttgttagatttcgttgcaatcaattaatcatgatgataattaattataagttttattagtgattaataataaaggttttaaattgcaattgcaatagttgaaattttttaaattctttgtataattcaatatgatgaaagttgctttgtcatttgtgactatggtaggtaactgggcatgttttccagccgatggtgacaccagatgttgagatatatatgcatgccatataaaatattcaaggaatggagacttaagtattgctttgctaatctctttataaacggggagcttattgtgtcctccacctctgctcaaaagtatcttgcaaaagttcaaagtttcaaaggatgccttaaataaaattggatgttctatcccctcggttaatatgaagtctcccatcaatatggagctaacaatatacaccaatgagggtggtaccttggctgttgaagatgccaaaaaaaaaaaaaaacacttcatgattattatttagatagcagtacaacttggtatgtgaaatcacgaggcctattgattactttgatcatatgttcgtgaaattgagagagctaggttgccttatttgtaaaatgtatcaatatatcaaaaaacaattaataaaagagatttcaaagttacttcaatttgttgcaaacaaatgaatctacctagaccttgaaaacatattaacttattggaaagcatcccctgatattaagtaaaatatgtagacatgtaatccatatataaagaaactcaaataaaagttacatttataaataataacaatgtacgtaaattatatcaattaaaaacaatttggatcgataaacaaatttatgtattttgtactgttcaatttaattatagtcaaacgctaggctgaaggaagagataattaacaggaactagaccaaaagataatgatataagaattaaaaaattattatttaatcataagacaaatttatcaaacatatatgtattcacgaatttgtatatcattaaacatcaaagtatctcagcacacatttgtccttgtcataataactataaaatcttgttacacacatacaatatcaaatgtttaagtggaccaaacaaaacattttatttttttcttatctcaaaaaagtcaactttgcttcaaagaactaatgcttactgggcaagaaaaatgtctcacacatgcaagtaaatagccttggagttaacttattaacattagtaatgaagatcaattcgagggatatatatctattttttatgattttgttatgaactaaaatgataataaattataaatttttttagtacttggatgtgtaaatttttttatagtcaaacactagtaataaagatcaattcgagggatctaacttgatttttttatgattgtgtaaattttccgttttacacaatgattagagattgttgggtgtgtagtttgaaatctattgctcccatgctattaatattattgaatgtattaaatgtattaagtagtaataaaattaaagtagatttatttttgttttgtaaggattaatttaatgattatgtatttttctttgaatttttattttgaataaaatattgttacaagataaagattaaattatattttagataaatagttatttttgtttcatataatattgataaattcatctatgaatatcttaattaatcttttcataacgaacgaaaataattatttatccaaatattattaaaattcaattcaatctaatacttttttttcaaattttattgtttactatttgcagtccttattaaattgattcagttatcaatatgtcaattttttttcccgtccaaaaaaaataactgaatttttttattagacagagactacatctagactcatggatatatatatatatagaggtatagagagagagtagagtaaggaaaacttctctaatctgcaacgtagatacataacaatggcaaatgaggaaaagaattcaggaggagctgtaaagaaagaaggtgattcgattgataagatactgaggaagggtatccgtgcctggcttacacaggaacaacaaaagaatcctcatttattttcgttcctcgaggatgacgacactgagattttgaaaagcatccacagaagacaagaagaaagaaagagagaagaagaaagaaagagcgaagaagaaggcacgtccacgaaaggtgctagcagtaacagtgatgaattgccaagtccatttaaagaaaagattcaagaaatgaagggatgtgaggtgaagttgctgatacagaagaaactttctgagtcagacttgaatccaaacctaaacgatgccagcttctctatgaaaattgccaacaattttctgacacaaaaggaggagtcctttctagaggaaaacgaaaggatttctggcatgcacgtcattgtgttggatccttctcttagagagtgcaacatgtgtttcaagaagggttcaagaagctgcttctacgacttgaccaatggatgggacagaattgtgcttcagaatgatctcaaactgcatgatatgcttcaggtttggtccttcagagtctcctctcttctctggtttgcacttgtcaagctgtgaacgaagatgccgtacatgtgatgtgatggtctgttatttcaatcttgataattactgtaaaagatctatgaatgatcaccctcaaaatcctctatgtcaatttagaagggtctgaagatattattcacttccaacactttcaagaaataataaaataccaattttctttgcttgtacatttatccttcatttactgcgttttcatttgtgtctttgttcccttatttctctttataaactagaaactcttattgcacccttttgattattcgcttgtcaaaatttctagtaaggttattaaagcatacaaatgtttttttgcatgtgtcatgcattgaactcttaagcagtatagtcctttgcagtgctaagagagggtggaaatggcatgggtaaaagcaaggaaatgaattatgtgtaaaaggtagtagtttatattatgtatgaatgattatttctattaattagaagctcactaagttctcctctaaagagggtgtctcctacgagcatttggagtttattggagactccacctctcaatcacaccatcaccaacaacctttatcgcacttaccctgatctccaaccaggccaactctctcttctacgtgctgtcaacactagcactgtgatatgtttgcgttgttcagatagcaacagtatccttcattcacatgacgggatgaaaaatctcgaaaaaatgatgccgagaacactattgcttccttgatgcttgtggccttaaaggagcataatcatctgtgagtgagaatgacgtgttattaaggtgtctcccatctcctgttattattgggtattgtttaattaaagagtagtgcaactcggtatatcaaatcacacggcctatttgattactctagtcatttgaaattgtaagagctaggttgtcttatttgtaaaatgtatcaaagtaactaataaaagagatttcaaagttactttaatttgttgcaaataaatgaacatgcctagaccttgaaaacatacatttaacttattggagaggatctcttgatatcatgtaaagtatgttggcatgtaattgatatggagaaactctaattaaaataatttggatcgatgaagaaatttaagtattttgtaatatttgatttaattataatcaaaagataggctgaaagaagagataattaacataaatttggcgaaagaaaataatcagtgttataaaaattgatccggtcattgtctaagttgaggtagtaggtcaataggtcagtggtccaaccggtggacaagtaattggtccggtttgacccaatctatattaaaaaaattaaaattatattatatatgtatataactaacattatttgattaagaaaagttcattcataatttcatactcaaaaatccaaaataacaataagccaattcgaaatgcaaaataaaaattgtagaaaataataaacgggatacaagaagcaacatctagtcaagcccatctaaaaaaaactaatctctcaatatatatatatatatatatatatatatatatatataatcttctcattttggcttgctgcagcgcccccgtccaccaattttttcttcctgcttctcccttgcaccaaattcttctcttcgatcatctctacatttggaggttgttctctctctccctccacgacgatttcctccgattcgtcgccatcgacgttgctccgtccgaagtcattctcacttcctccatcaccactctgcaccgcgtcgcacccacacacgctagtaacaacggagatggcgtgccctgctgcagtgagcgtgagtgcctgaggccttgaactaagccgtgaacaaatgaagaatttaagatgaagaaaagttgaagcttttttttgggttttatgcgtctgaagcattttttcctggggcatcaaaacgacgccattttgtgcgtctgaagcttttttttttcttcaccaaccccgtctgggtcctaaaaaccggcaaggtttttggttcttcccaaaacggttttctctgggccacacgcatggccgattcattagccaactcagcccaattgatgctaggttcccgattcaaccgctccaactggccgattcgaaccaattttaatatcattgaaaataatgttagatttcataaattattatttaatcatatataagacaattttatcatacatgcatgtattcagggatttgtgcatattaaaacatcaaagtatctcccacacattttcctttgtcataataactataaaatcttgttaacacatgcgattaagtgttaagtagaccaaatgtacaaaaaacattgtattaaagtttttttcttatctcaaaaggggcaaccttgcatcaaagaactaatgagtacgaggcaagagaaatgactcacacatgcaagtaaatagccttggttcttgtttatattcttttcttttctaatcttaaaattaaagtgattcttgaagggcaggcaacgcattatttcatatatattagcacatatataacaacttattttgtttgaacttatagtggtcttataaatttagaattgttaaactgatactcttaattaaaaattaaaatcagataaaaatagcttaaaacatggtccatgaaagcacaacatgtagtaaaatatataacaactctcagactattcttggattttcaatcatacagagagaaaatgaccaaatattccaaactcaaactccttagttatttcataaacgcagccataggttcaatttcataatacaagaaaggtggtagtggtagttggttagaaaccatgaatgaggaagtgagaaacgttcttgcgctgatcaccttggagttggataatcttgccaagctccttgtcatgcacaacattgccattgcagcaaaactctttcttgaggtctttgaggatcttctcgtagctgaactctttcttcagcccttgcactgtggtcagactcttcttcccattcctctgttgtatgcggatatgcacatactcttttgccccgggggcatctgtttcttttgcctccgcaaatgggtcgaaagtgctcgtagggatgtgataaatacccacttcaaccatatatatatatatgtatatatatgaaattttcaagataattttttgaagtgattgatcatccaccttcataataaggaaaaatatttttagaaaaatagaaagtgctcgtagggatgtgataaatacccacttcaaccatatatatatatatatatatatatatgaaattttcaagataattttttgaagtgattgatcatctaccttcataataaggaaaaatatttttagaaaaataaatatattattttaagttttaatatatatatatatatatatatatatataataaataggccagcctgatatacctaacatgtttttttttaagtttgagcctgacctttttatttaagcagacttttcaaaaagccttaacttaatttttatagtaaataagtcaggtcagcccttaaataggtcaagccaaaagtccctgatagacggcctgactcactttcacctctatctccaaccaacccggccaggtctcttacctccaccattgcgtttggccacaatgcccctacccttgttcggcaagtggaatgctttatggcctatagtcatacttattttcactaatatatttttttactgcaatttcactaatattattaagactcagttctttttttaataataagtactaagataaaacacatttaaaatttacatattaataaaagatatattatgttaaaaaataaaacaataataatattattattaattccccgtgcattgcatggacttacatactagtaaaataaaaattagaacatcaaattaaaataattttggtattaattgtttctttttttccctaatcttcttcctaaattttggcaaaactaaatatatataaactaaaaaaataaatctacaattttttttctttacaataaattcttttaccaacataaaaatatgccaaaaatattttataaagtatattagtaatattaattttttataagaaaaagtctaatcacgtatacataatttaaattataaaaacgagcacataattcaaataaatcaattatttcttaaacacgttatgccttgaacaatatgtgatttcacattgagaaattttttcttaattttaaatttttatttataatttttgtttttaaaattattaatttttattataattatagtgtgattttaattttaaacttttgataattacagtaatatttatcaatcttaattaaaattgtattcttaaaattaaaattataaatccaataaaaacaaaatcttatgattgattaaaattaacgtgttttatttgttttgaataaagttattatttaaaataagatactctataactttacatcaccaaaacatattatttttgaaatttaaattatattttctaaattcgaattacaatcttgtaaatatttcaatttcaatgcaattcaacaaaaaattaggtagaagattataaaataagaaagaatataaatatattttttcttgataatttcgcatcatttactggtctttaagaagacttattctcatagtacctatatatactgcggatgatttggtaatattccagtttttccgctttgattttttaaattagtatatttgattagttgtaaaatttgttaggttagtgtatactcatatataggtacagaaagactagctagagaaatgaaacctctaatatgcaacgtagatacataagaatggcaaatgaggaaaagaattcgggaggagctgtaaagaaagaaggagattcggatgatatatttttgaggaagggtatccgtgcctggcttacactggaacaacaaaagaatcctcacttattttcattcctccaggatgacgacactgagattttgaatagcatcctcagaagacaagaccaaagaaagagagaagaagaaagaaagagagaagaagaaggcacgtccaccaaaggtgcttgcaatagcagtgctaataataatgttggagattccaagaattacaaggccatgtgaagaaattaaagattcaagaaatgaagggatgtgaggtgaagtttgttggaactagctctccctagatctctgaatatctacaagcacttcttcagtttatctttaattcaaaaaataaactctatgcatttgttgcataacaatgttatatatcctttagttgtttatgtaacaaattaaactgactcgtacttcacttatacatcaataaattcagatctttcttttcttctatatggtatcacaacctaattgcctgtgaatagggtaccactgtctgccctcctaaatccatcaccatcaatggttccgtaaccgagaatccaaattattttttaatgttctattcgagtaaattaattttttttatctgaatatgttattaatttcataaaatatatcttataaacaaacaacaccgtcaccactgcgttcgccacagtgcccctccccttgttcagcaattggaatgctttgtggatgctattgccgaagagaattaccctgtgccctgtgctgcatgccagattagtgaaggcatcaaaggtccttgcatacgtttatcaatccatcacgatgataatgaatgatatttatctcaaatacttgttagatttcgttgcaatcaattaatcatgatgataattaattataagttttattaatgattaataataaaggttttaaattacaattgcaatagtggaaaaattttaaattctttgtataattcaatatgatgaaagttgctttgtcatttgtgactatggtaggtaattgggcatgttttccagccgatggtgacactagatgatttggaccaaaaaaaaaacacttgatgattataatttagatagcagttattagaatgtggattttgacctaactcaatcccaaaagctagcttatagggtgagggattgttctccacttatatactctgacttggcactatctctagccgatgtgggactcaagcagggtgtaatggatttaggataggctatgatatcgtattagaatgtgaattttgacctaactcaaccccaaaagctagctcatagggtaagggattgttctccacttatatactttgacttggcactatctctagtcgatgtgggacttggattatttccaataacagtacaacttggtatgtgtaatcacgaggcctatttgattactttgatcatttgttcgtgaaattgagagagctaggttgccttatttgtaaaatgtatcaatatatcaaaaaacaattaataaaagagatttcaaagttacttcaatttgttgcaaacaaatgaatctacctagaccttgaaaacatattaacttattggaaagcatcccctgatatgaagtaaaatatgtagacatgtaatccatatataaagaaactcaaataaaagttacatttataaataataacaatgtacgtaaattatcaattaaaaacaatttggatcaataaacaaatttatgtattttgtactgttcaatttaattatagtcaaacgctaggctgaaggaagagataattaacaggaactagaccaaaagataatgatataagaattaaaaaattattatttaatcataagacacatttatcaaacatatatgtattcacgaatttgtatatatttaaacatcaaagtatctcagcacacatttgtccttgtcataataactataaaatcttgttacacatgcaatatcaaatgttaagtggaccaaacaaaacattttattttttttcttatcttaaaaaagtcaactttgcttcaaagaactaatgcttacggggcaagaaaaatgtctcacatgcaagtaaatagccttggagttaacttaacattagtaatgaagatcaatttgagggatatttattttttatgattttgttacaaactaaattgataataaattataattttttttagtacgttgggtgtgtaaatttttttatgatcaaacattagtaatgaagatcaattcgagggatctaacttgacttttttatgattgcgtaaatttttcgttttacacaatgattagagattgttgggtgtgtgtagtttaaaatctattgctaagatgttattaatattattgaatgtattagtatcaagttagatttatttttgttttgtaaggattaatctaatggttatattttgatctgagtcttctattttgaataaaatattcttacattaaaaagataaagattaaattatattttggataaataattatttttgtttcatataatacataaattcatccataaatatcttaaatatgctcttttaatacgaaaatgactatttatccaaatattattaaaattcaattcaatctaatacttttttttcactttttattgtttactttttgcagtccttattaaattgattcagttatcaatatctcaattttttttcccgtccaaaaaaaaaaactgaattttttttattagacagagactatatctagactcatggatatatatatatatatatatatacacagaggtatagagagagagacagagagagtagagtaaggaaaacttctctaatctgcaacgttgatacataacaatggcaaatgaggaaaagaattcgggaggagctgtaaagaaagaaggagattcgcgcttaaactggaacaacaaaggaatcctcacttattttcattcctcgaggatgatgacactgagattttgaatagcatcctcagaagacaagacgaaagaaagagagaagaagaaagaaagagcgaagaagaaggcacgtccacgaaaggtgctggcagtagcagtgatgaattgccaagtccatttaaagaaaagattcaagaaatgaagggatgtgaggtgaagttgctgatacagaagaaactatgtgagtcagacttgaatccaaacctaaacgatgccagcttctctatgaaaattgccaacaattttctgacacaaaaggaggagtcctttctagaggaaaacgaaaggatttctggcatgcacgtcattgtgttggatccttctcttagagagtgcaacatgtgtttcaagaagggttcaagaagctgcttctacgacttgaccaatggatgggacaaaattgtgcttcagaatgatctcaaactgcatgatatgctgcaggtttggtccttcagagtctcctctcttctctggtttgcacttgtcaatctgtgaacgaagatgctgtacatgtgatgtgatggtctgttatttcaatcttgataattactgtaaaagatctatgaatgatcaccctcaaaatcctctatgtcaatttagaagggtctgaagatattattcacttccaacactttcaagaaataataaaataccaattttctttgcttgtacatttatccttcatttactgcgttttcatttgtgtctttgttcccttatttctctttataaactagaaactcttattgcacccttttgattattcgcttgtcaaaatttctagtaaggttattaaagcatacaaatgtttttttgcatgtgtcatgcattgaactcttaagcagtatagtcctttgcagtgctaagagagggtggaaatggcatgggtaaaagcaaggaaatgaattatgtgtaaaaggtagtagtttatattatgtatgaatgattatttctattaattagaagctcactaagttctcctctaaagagggtgtctcctacgagcatttggagtttattggagactccacctctcaatcacaccatcaccaacaacctttatcgcacttaccctgatctccaaccaggccaactctctcttctacgtgctgtcaacactagcactgtgatatgtttgcgttgttcagatagcaacagtatccttcattcacatgacgggatgaaaaatctcgaaaaaatgatgccgagaacactattgcttccttgatgcttgtggccttaaaggagcataatcatctgtgagtgagaatgacgtgttattaaggtgtctcccatctcctgttattattgggtattgtttaattaaagagtagtgcaactcggtatatcaaatcacacggcctatttgattactctagtcatttgaaattgtaagagctaggttgtcttatttgtaaaatgtatcaaagtaactaataaaagagatctcaaagttactttaatttgttgcaaataaatgaacatgcctagaccttgaaaacatacatttaacttattagagaggttctcttgatatcatgtaaaatatgttggcatgtaattgatatggagaaactctaattaaaataatttggattaatgaacaaatttaagtattttgtaatatgcgatttaattataatcaaaagataggttgaaagaagagataattaacataaactcggcaaaagaaaataatcaatgttataaaaatcggtctggttattgacccagttgaggtagtaggtcagtgatccaaccggtggaccagtaattggcctggtttgggccggtctatattaaaaaaattaaaattatattatatatatgtatataactaatattacttgattaagaaaagttcatccataatttcatactcaaaaatccaaaataacaataagctaattcgcaatgcaaaataaaaattgcataaaataataaacggggtacaagaagcaacatctagtcaagcccaactaaaaaaaactaaactctcaatatatatatatatatatatatataatcttctcttcgatcatctctacatttggaggttgttctctctctccctccacgacggtttcctcttattcgtcgccatcaacgttgctccgtccgaagtaattctcacttcctccatcgtcactctctacaccgtgttgcacccacacacgctagtaacgatggagatggcatgccctgctgcagtgagcgtgagtgcctgaggccctgagctaagccgtgaacaaatgaagaattgaagatgaagaaaagttgaagcttttttttgcgttttatgcgtctgaagctttttttttttcttcaccaactcggtttgggtcctaaaaatcggtcagattttctattcttcctaaaaccgtatggttttctttgggccatatgcatgaccggttcattagccaactcggcccgattgatactaggttcctagttcaaccggttcaaccggtcggttcgaaccaattttaataacattgaaaataatataaaatttcataaattattatttaatcatatataagacaattttatcatacatgcatgtattcacggatttgtgcatattaaaacatcaaagtatctcccacacattttcctttgtcataataactataaaatcttgttaacacatgcgatcaagtgttaagtagaccaaatgtacaaaaaacattgtattaaagtttttttcttatctcaaaaaaggcaaccttgcatcaaagaactaatgattacgaggcaagagaaatgtctcacacatgcaagtaaatagccttggttcttgtttatattcttttcttttctaatcttaaaattaaaagtgattcttgaagggcaggcaacgcattatttcatatatattagcacatatataacaacttattttgttcgaatttatagtggtcttataaatttagaattgttaaactgatactcttaaaaattaaaatcagataaaaatagcttaaaacatggtccatgaaagcacatgatgtagtaatatatataacaactctcagactattcttggattttcaatcatacagagagaaaatgaccaaatattccaaactcaaactccttagttatttcataaacgcagccataggtttaatttcataatacaagaaaggtggtagtggtagttggttagaaaccatgaatcttgatctgatccttcctaacaaggcgagcatgaatgaggaagtgagaaacgttcttgcgctgatcaccttggagttggataatcttgccaagctccttgtcatgcacaacattgccattgcagcaaaactctttcttgaggtctttgaggatcttctcgtagctgaactctttcttcagcccttgcactgtggtcagactcttcttcccattcctctgttgtatgcggatatgcacatactcttttgccccgggggcatctgtttcttttgcctccgcaaatgggtcgaaagtgctcgtagggatgtgataaatacccacttcaaccatatatatatatatgtacactaatcaccaccctagctgcaacaaaatgtacaaaccataagccacatgtgacatgttcatgcatgcatgccaatatcaacatatctaaccataacaaatctaaagcctcctattaagcatttctttccttcacgctgttttattgttttgtgtcagagatcatgaatgtctctcaattcattaagttagaaactaatctcactcgaggtgcgtgactgcttttgattcaaaaaaatttgcacaaagaagaaatcaaatacaaattttttcattaaatacatcttctctcatatatgaacgcaatggtgcattattacacagttatgtcaaccttatggattaaaatcaaaatctttccttcacatcttgcaagtacatataattcgtaaggaaagtagcaaaaaaaagagaataaaatgtctttcttgtgtaatagagacattaaacatggaactcaaactttcacaaacacaattttttagaccaagtaggaattaaaaatgagctaggaagatctaatgttgaaggagagacgaacctgtgagaaaggaggacttgtaaacaaagcaagagcgaattgagaagaataggtagtggtgggggtatatatagtagcggggtgtgcgtgacagaataagcaatttaatagcagtgaaattttttaggacaaattatttacaccatgcaattaaacatttgatagtataaagtaattttttaaatgtgtgtatatattatatattgatataagtttacagatgttaaatattgatttacatgtcttaaaataaataaaaaattcttacaatgtgacaatttctcacagattgcaatgggtctaatgatggttaatagcagaatataaggtgtttttgggtggatggagtatcctattctccatgggattgatatctggttgtaatttaaggcatagaaacgcaagataatttgtgtggtatatagtagttgtggtagagaacaagaacaaaggaaagaagaatctagactcaaattgctttggagattctgttccttatgcttgtctgagtgttacagatacgaattcttttaatttttatcacttctcaatttgcattattttataatatttgtctgtagaagatcaaaagaaagatcgggacaaaaaataattgtttcaaatccttttacaaaagagaaacaaaattattccagtccaattaatcatactgcaaaggaaattattgatcagtatgatatttctgggtttttactttttatttttacatgtgagtagacttccctgccttctaacttctttccaatgcattaagtaggtttatttatatctttctgcttttaaattcaccgtaagtatataatttaaatttgaaatattttttacaattttttataatattatcatctaatgatataatcatataaagtattaattaaactcttagatttcttaaatagtaattaaaaatttatgcagatcacagtgatactttctcccagtttaacaaaaggtttaaatatatttttatctataataaatatttaatttttacattttatttctaataaatttttattttactttaactctctaataaaataacaattttattttttatcattgacaagttctaataatttttttcatttatcaaatactcaaacaaaattattattttattagaaactcaacttaaaataaaaatttattaaagaataactacaaattttaagtatttattatggataaaacatatttaaacctttaacaaaattaacatatcagattttttaggaagatgttgattataagcctatacacatgaattgtttttatgaaatttaattgcaattttatttcttgaattttaatctctcaatttctctacaaattccagtattttttttataaaacatttccaacaaaataacattatatcttcttatagatcttcttacaaatcttccaagcacaacatatatacatatccaatttcccttttatttttactttttcttttattcaaagaaggctatgattaccttatttttcaccctaccactcttaagcaaaccaatactgaacagacacaaaatgattaatacaacagccttcatttttcattttttatcaattgcataaaaattacaccttgaaatatctggccaaattagataacatgttatcctcccctcaatattctactgtgccaacacaaaacagcaaccgacaagatcatcatgccaccaggagtgagcagttaaataatgggttgatttgaatgaagatagatcataagctattttggtacagtcatgaaactataaattcaaaacaccacgctgtcgttataaaaagaaagaaaaaaaaaaaaaatcaaacattacatgcaaggttaaatcatctttaaaacgaatacaactaatttaaatcacatttgtaatccatcttgttaagaaacaaaatcctcttctgatatttccaagtacatcgcttctcttttcatcataatcaaaattttctactgcctttgacaaaccaaagaggcttcaattcattttttaaacatattgaatctcccaataatcttgtatcttcacagaagctttagatctttttccatgtacaaacagagcattgacaaggttcatctcaataactaggtgaagaaaaccaagataaagaggaaaatgaacagcaccagcaaacccaatatcatcatgatctgtccctttgcactagccttcttcatgaccattgccacttttttctgatatcataaacaatgagacacacttcaactttcacattcaacattaaaaatttccctcattatattaaaaaaaaaaaaaaaaaaaaaaactacatatttcattgcccaaagactcctccctatgcaaaggtaaggaaaaaggatattgtacgcagtcttacccttgcatatgcaaagagactatttccggattcgaacccatgaccaacaagtcaccaaaacacaactttactgctgtgtcagggctcgccctccttatattattactaattaatcacagcaatcagccagatagatcatacattttaatgcaataatggaaactcgaagcagaaactcacttggacaaaatctaggcgattagatgtactgtccatctcattacccagctcatcaataatcttttcctgaaacatcaaggctttgacaattttagaatgagaaatttcccaaggaaacaaaatcagcatgagaacacagctactattgaagacactcaaaggaaacataagcaccaccagttttgcctagtttcatacttttgaaacacaagagtaataatagaaatccgcagccttaacccgcaaggggagaggctgtttccaggatttacaccagtaacatccaactcacaagacagcaacaaggctctcccactaagcaaaatagtaagatcacagaccaaaaacttgtcaaatgtcaaatctacctgcgcaaggagctcttcatgtatagtaagtccaacacctcctattctttgtacacttaaactaagctcatccaactcctcatcttgtctcctatcagcaccaatagataaaatataagacaaaaataaaatagaaaccagagattgattattttccaaaaacacttgagcactgtatttccagcctttatctgtgttaaggctacctgccacagtctttactctcccccattttctttttcttccacagaaaaaaaggggaatccatcattttagttaatatttcttatttaatagaaatagtataatccaaacaaaacttaaataattagcaaagatgatattaaaaaacagaaatttataatttgtaaagaagcacaagaaaaatatgttcatgtgtccacaatttcatacagaggagcccacttatgtctcagaaagcatagaggaggagtggacaatataattaaatcaacttaagaggtcaaactaattaccagaatattttccaccttgcatgcacaaaagtcacggtcaagtgtcaatttgtttaatatcaagaagatgtgcacaaagtcaagtaaaagcaggacaaaagacaaatatttaattcaatgccatataaagtgagagagagaaaatgggaggaaagaagtactttataagaagcatctgcctgtccgattctgactctatgaaatcatcattatcctgggcagcatattggttagatgtagtttgatgagaactaggaagcctcattaattccttgtgcatcccatttagacaagcattgtttaagccctttccagcttgcactgctttctttgctgtgctcacctaataatgtattacaatcattcacaagcaccatacagataaaaaaaaaaaaaaaaaacagagagagaagggaatctaataggtgctagcaataaaacaatgttgaatgaactatacattaggttgagaaaaaatttgactgtattctcctaactcttactcaagttcagcatgttatagatacctgggtgcgagcatcacgggtccacttcctccggttttcaacctccacttcatcaatgccataccaagaaggatctctagaggctacagaaattgctttgtccaattcatccaccttcctatcaaaaaaattatattttagcagtttgaataggttgtattgcagaaggaaaaaccatagcctaagatgtgtggcaaagagaggctagacaaaagatgtgctagtagagttagaagtaattttctatctgttttccactctctgatttaacaaccaacaaagagtgaaaatcaaaacatttccagctcactccatttttactccccttcatctttccttacagacccaaagggaaggggcaaaatcaaattaaaagaaaacaagagggaaagaagggagagggtattgatgatcttgctctccctttattgggtggctaaaaaatacaatggggagggaatggaatgatgaataaaaatacatgaatataatgcattcactatttattaatgagctcttatattaactaattaacattaaaatttaacaatgatatttagctgaaatttacaaagatttgcatcctcacaatgatcacagagtgaacgattcttctgcttttttatgataaaaaaataccatgtatttgacataaattgcagcatatgtcagaatcattttggacagttatgtgcacatcactctttttacttcctaccacaataaaatttccccaaggaaatacctttcccttcctctgacctagattgtaatataatccaaacatccctctaacgtgtacctaataatacacaaatcccatttcatacaaatgatactagtaccacgttggaagaatgaatgaaactcattgaaaacaaaaatttataggccaaccaacttgtcagtggttcaaaaaaatacgattggtatacctgccatgcaatgctttcacaactagcaagaacttcctttgatagattggatcgctcgccagcatcagcagtcttttcccattggtgaaacgtagattgcagcttatcaatcttaccagaaaatgaaaattaatcagccaataaattacacatcaaccccaaaaccaaaaatcatagtgttatcctccaattacagatcgcagttgggttctatccaaaatccaaattttgcattaaaaaatggcatactcagatcaattacataagatattaggagcaaaaatatcccaattaataatttcagctcaggaatcaggcttgagaagatgaatcacgtaaagtcacggatccactaataccagtaacagagaaatcatacagaaattctaagtgcatcgcatgatctatgaaaaaaagaatgtaatctttattatccaaattgaaccgaaaacgaaacctaggtgatttgggaaaagagaaaatacttacagattcttgaatttcttgcttgacaacgtagaatggatcttgagccgaaggcatcgtgtcttgctgtttcgaaatgcttcactttaagcacagaaaattggggaacagtgtcacgcttcctctcttccctttcatttctcagcttaatatttttttgccaacaatatatatatgttcgaaataaatacaattagttggactttatttaaagataaatgagttaaaggaaataagaagtcatttttctaaataataaaaatgcaaacaaattcgtgtttttttcttttctttataacgagtatttttggcttttcaaacaactttatgatgtttgttattaatttttttaagttaatattttttagttcatcagaaatattataaaacaaaattgcaagatttatattggggtgataacaattaaaaagtaatgattagtacgtgaaaggctgctataaaagcaagtgaaatatcagaatatttggtgataggcttagttttttatgattatcattaataatttgataataatattttatacagttaatgttttggagctaaagttaattaattaaatccatactcgtttatattaattactgtacgttattgcaacatgcctcggttttttatttattatttaaaataatagatcataaattctaacaataattaacctcttcatttttattaatttttttttaaatttttaatatatctttttagttttatgtctcacgctcaagttagtaaaaaataaaaacaatggattgactgtaatatgataattgagattaacagttttgtagtacagtgaagtgttaaataaaatagataaaatacatgaaaattaaacattgcataaacatattgatttgccattaagtacattcagatccatgcgtaaaaaaatctaaaatggaatttattgtgttccacacatttcacatggtgatggtgtgcctcagaaatccaaagagaaaaaacccattgcttaatcaagtttcggataatatagggaagaatgccaccatgatcaaggtatgccagctccaccagcaaattgagttgctaaataagtatatatcatagtgaagccactgtgtgcaagtgcgttgatcaatcttagatgataaaccatatatagaaggcacatgaatttagaaacttacatcaaggcaaagcttgcatttaaaagatttgccaatgtcagtggacacataaacatcttgaccaggttctgtgtcaccaacttttcctggaagatcaaagttgaatcactcatgacccgtcacttcttgtgttcatcatgtttgaagcagaggggtatgatccccatcccaactagattaccacggtgaattctctcaaagctcttagcaataactcctttcaccccctatgtgaacaagcaagtgaaaaaatatttgtaaaacaagaaagcagtccaataaatatactcaagtagtgagactatggagttttactgtcatctattacaaattatgatatatattaaatttgttaactttttcaatacctaccataaaattagtactaacatgatttttgattgattaattgataatataaaatttaagctggtaatgtataataattaaacttacaaatataacgaaataacattttgtcattggtgagctcacgagtagtaaaggacccttggcagcccaatcttgagagccaagataatggtgtccagaccagcacccttttacagttgtacctctataaagtatgcacaatatcatattatgtggtatttatttgcataggaaacttcaacaaatggacttcatacaaataaaaccaggaatgatgcattaactaggccaaacaatgctttgtccattgcgaaggggcattttggaatatagaagggtatacaaattcattagtcaaatcaaaggttccaaactaacatttctcgcattctcccaattagtatttctaaccaaattaacaaattaatatttgttgataaaaaaattatcttaaacatacacttggttttctacgcatgttttcaccaccggtttaattactcatctgtgggacaattcaatagtgaaactaatttgtgtactagttcggcccaaggcctaaaacgtctttttttttttaaatctggcccagaatatattaacaagcgcttctgcacaaccttcccactcattctatttttctatcaaattgcattattctatttcatgtattttttgtattttgtatgttacatgatatcaaattgcatttttctggaaattaatttcccgagtaatgattaaacagcataaaggaatattttgggtatagagaggactaatgataataaaaaaacaataaaattaaaataaaaggggagtgtacttaaaaaaaaatatgcatgatatagcattcgccaaagaaaaatcaaccctcccatcgaaaataaggcccaggcccagcatatgcacggctaagcagaaaggttcatgtgagaaatgtatttcattttaaaattgtaatattaattctaattatgacatggacttctgggatgtaacctgtcacctaattttatcttaaacaatgacaaaaaaatcatgctcgattcagaattgacaaatactttttgtttatgtagttgaaggaaattgacttttttttcattcttgttttatatgttccacatttgtaatttatgtaaaatacgtaaatagctcattgagcttttcccaaaatgtaatatacacagatagcaagggagagaggacacatatcaaatgagattcttttaatggagagaaattagaactataaatatagattattagatcatatttatatgtttaagattaaaaaaataattatgcattaacagtaaaataaaacttttacattattaatttattagaaattattattggtattatttttatacatattaaattacatttataatttatttaaccattgaatattttgattttgaccaaagatcacgtattggatattgtatattgactaaaaatatgactaaaataaaatatataagtaggagcaaattttacttttataagttagttttgtagatttaagttaaacacaaactcacgttttataaatggaataaaagtttatcctaataagtgttgttatgcttatcaaaccaccactattagatcattaattatcaaactactaataaatgttcagttttacaaattttatgttgagatgtttagtcctcgacatgagataatgtatatgtttgagaactcattatgatcaaattaaaatatttaatgggataagcaagttttgtgatgtcaatttattatattcatacccaaattttaagatcatgcaaatcaaattttaaataagtgaaatattttttattatgtaatgtcatagtcaatattttacttatatttttaaaaatatattatgcatttagttaaatttatctaatgatgtatctaataaatttaagattttataaaaaaataacttatttaattatatattataagcaattttaatttaacggttgaattgataaaatttaatgtgtaaaaattattgaatataacaacttgtaaaacaataatattaaaataacttgtagatttattgtccttttgcaaaaaaaaaaaaaaacaaaaaaattgcattaacttaatgaattttatgagaaaacaacctaagtgtatcaattttcatgtgattcacatttctgagattctaagttcaaaatttgcatgatttcacttaattatttaggttttaaaaatgtttgatggacaccataatgctatgcaacacctagtaattgaaagtaaaaggagaaaaaatatagatatggtagctagagtttatttggtaggaagagagagataaagaaaaataagcgatataaataaaaatgtttaaaataatgagtgtttatgtttcataaaagataaaagatgacaacacctaaagcaaaaaaaaaaaaaggctaagacttgcaagataaaccaacaacgaaaaatgtcacacttggtatatatcgtggtcagctacacatgatgccaccacgccaatcactacaatggtgcgcatgctgctgaattttgcgccaaagggaagccatgttagagctcgaccccagtggtttctacaaccccatgcctagcatttctaatacctaccattcttgcctattgaatttttttcttagttgctcatttgtgtctgttcttctctaatttttattgaataccaaaaactaaaatgtaattacttccttttttaatttctcaaacaaagatgtactcatacattctagtatatatattagttgtatgattgatacacttaattgtgtctttaacaccaataggtaacatattacatgttaatagttaattaacctcttatcatctcgcttaatgataattaaattccataataggtaacaaattatcatgttatctcatctaatctcttgtcatatatatgaacactaagaaaaaggcctataaagaagacttaattagcatcatataccaagtacgccttaaacactaaccactacgtcttaactcttactcttattgacttaaagcattagaggcatttacagttgtgaccttcctctcatcatatacctaactaaaaagatcacttataaagggcaccaacccttcaacgtactttcaacctgaaggtttgtgagagatttcctagctttgagccaataaaaaacaaataggatagaacttaattagaaatactttttgtcgttgttctcctcattaaaattataattttacttttataacctctataattaaattcggcattaaagataaataatgattattaaatacacctctaatttcaattgtagaatataaaaagaaataaacttaaaatgaattgaagccaaagttatgtatgtctgtctcgatatttcacgtacattgcaggtagattaattgtggccatatatcagtaaatgtttgaactttgaaagcaataaatactcgaaacaaatctagcctcctaatgcacgtggtttggcctacattcccatatcgttaactatgaaaactttttggctgaacgtggggtttgtcttcacttgttactacttaatgaattatgacatacagctaccttgtcagctgcgtaaactacatttttggtgaacactggatgagattgattggcatatatggcattaattcttgagtgtaatatacgcatttcttcaccatcgtaaatatacttcagtgctcagatactagctctaaccccacacccacctaaaaagaaagaaagaaagaaattaaaacacgtacaaaactctcaatcaattaattaatatacgccaacagaaaaatatattacatagtataatacaaaattaaacatttgcacgtaatccaataatatccaacatcagtgatgcacattagacaaccaatgtaaatttgcaggaaattaagaaagtgaaggctaagtgagtgagatatattgccgtcagtttcaattacatttctgtgttgcatattcaaaccgctggatccaggttgaaatgagagtgggcaaatgcacctcctcattttaataaaatcattaatatttgtccaaaaatattatattttatacttcctaattttatattttgcattccgtaatttcatgtatttgaattttattattagtgcatatgtaagagtaagtaaatgtatcctcttattttaataaaatgcacatatttatcttgaaattttatattttgtaccttttatcttcgtgtttaaactcaactatctcatatgataatgataattatcaatttttattttttaaaataaattgtccccactaacccagaatcctagatgcgtcatgacactgttttcaattcccattaatacaacaacaaaaaaattgagctgagatcaaataattaagtgacatataacaattactaatatataaatttttaattatgactaaaatcagatacctgtgctaagtgttgattatcgtactcaacaccagtgctgtcactttacagccgccacctcaatgctgtgcatggcttagcttttagcaagaagattctgctccaacggtggaaaatcttatatagcagattaattctttacataagattcccactaaatcctgggagtagttattctccctgacaaaatttcatatccatatatgttgaatggtggattggcaattggtgcatgtgggccacgttgatcttcttcaacatcagaaactttcacgaaccatttccctttggtttcaatttacacagcttttttcagaaaattaaagaaaaaaaagaattaaaaactttgacaaagcaaatgctgtgccagaacagagatcatttccgtgtactaattttctttctccttatagaattttaactttttcattttttatctactaatagttttacgttaccttcctttcaactttattttttatattaaattaacgtatttaaaagtcacattggaatatatatatatatatatatatatatataactatgtaatagacgtaaaatatttattagttttacttattaattactatatatttttcattgagaacctgactaattatttttaacaaatatctctttttaattacttttttattattcataagacataaatgtaagacccttacttaaggattaatatcaagtttcatcacaattaatatgttaatgttggtagattataattaatttgaattggatggatttatttaagctccttaacaattttttccacttgcaagactctatttgagatcttgttcacattacatatttcatatttgagtctttttattttaaaatgagatcagttttaagaaatgttttcctttttcattaatttacgtgactttatatttatattttcaaatactgttacttaaatttaatttaatttaaattttaagttttaatgcattgtaaattaaatatatattttttaaactaaaaggaattttaaaattatcatagtccctataaccgtaatttaaatttattttttaaatttaaagttatatataaaaaacatatttttttatatctttcttctaaattttaaaactactatatattttatttattttcataaaataaaataaaatatatattaataatattgaaattatttttaatttagaaatttcatttaaatttaaaatactcctataatatactaaaaatgtactaaaaaaatatatttgtaaccttatcaccctaatcacaaacatcagtatatcatatatatccttccctcttgatgatatggtaataaaaatgtatgctctaggatgaaaataagttaaagaaaaaacaaaaagaggaagacaagacaaaaaatggtcgtgtaattagggtcaaatgtgcatcataagtatttttttttacacaatttccaacacttgtattcatgtgtgttgttgaaacttcgactcttttgtctgtttcctcgagaatagcctgtctttatctgttcgccaccaattcaagggggctgtatataccatcgtttcttgtagtcttccttagaattttcaagcacatgttcttcaatacaacattttaacccgaagaggatctagaaaattattaaatgacacgaccacaatttaatcagagttaattttcaattaatgctccattaatagccaataatcaaatgtcactcgcgtttattaagttatatcattatcaaccttgatttgtgatgaatttggatatagggcgtggaactggtgtaaagcaaaaggattcgatttctccttgtatgtttggaaaatagaacccctgagtgccgttgtatgcatgagtgagcacgggtctacttggtttattgttttgggattgggtctactatggtgaatacatggctgcaatatttatgtgatttcttattggatcatgattgcagcatcacacttactatattgtgcttgtataacttttctggttgacacatcttatggcagcctgtttattaatattaaatactaaatttttttttataaaaaaataataatttatgattgaatgatagtataaaattatttaatgaaagaaatagtgaaggaaaaaattaatcatgagttgtgggcacttattgaaagggtaaatgttctttatgtcaagaggtgcgtgagcaatttgtataaatatggagaaaaaaaacatacaatttaaaatataaaaaaaaaagatgttgagaaaataattttttattagtttataatttattaacaaattttattgtagataacatgttttgcataataatataaattttcaataaaaaaatcaataaaagaaattatcaactttatttaatggtaatatactagtagttacaaatgaaacattaatttattataaataataatgaaaaaaaatactttttagtatactttttatgtatgaaattttaataatttttaaatatatttattaacatggaaattcatgtatcggggaaatatattgaaattattgcatgtaatatgtatttaagttaattatgtattacatttaattaataaagcatttaatattaatgtgaaattaattttaattatataatatgcttataaatttatcttattataactatcttatttttaagagtaaagtttgtaataactatcttttatgtaatattcttttaatatatttattatttattaacatgaaaaagtatatagcttagaaacatgtcataattaattaccatgtcatttaatagtttaatttaaattaattatatattacattgttaattttcatggaatatatattacattatttaataaacatagtatttaatattaatgtactgttaattatttatatgtgtatatatatatatatatatatatagagagacagagagagagagagagagagagataagatagtgttaaatataaatagaaaataataacaatatattaatatcatattacaatattttcatgttttctcgtattattagtttaatatgtatttattgacttccatcttattgaatttaaatattttattttaatttattatgtttatagttaatttctcaaaatttatgaattttcttcaaaaaaatatatattatatattcatgaattttttgtattataagattaagcatttgattaccttttatttcaacaagtttatacattataatatgctccaaataataatgaaaatgataagtttcttgatgaaactatattttcaggtatgaaattcttaattttcaattatgataataattttataaaaaatatttatcaatatgaaaatttattaatcaacataatatattataatagatgaatgtgtatgttatagtcaatgtattactgaagctaattatgcttgtatttaacaaatatagcatctaattttaatatcagttaagtttattaatataatatatttataaatttattttgttctaaaaaattaatgtatttagtatattttttagatattaattttaatataattaattttacaatgagaaaaatttaatatattttttcagatataaattttttataattacttttatgataaaaaggtttgaatatatttattaatatgaaaattaattaatttgaaaaatgatttataattaattaatgcaaaaatgaatattattatgtatgttaattatgtattacatttaataattttagtatttaatataggtatgtatttaattttcatgatacaatatgcttataaatataaaaaatctaattcaattacttaagcaacataagtaaattattataaatttattagtacttaagtttgatttttatggataaaaatgtttataagttaatttattctatacttcaagcaaggaagatttgaggttagagtcttataaataaataaaaatatgatgaaaaacatatatttactatgatgatcaatgaataaagattaatgatcattgaaattgatgaatatttcacagcattactctggtaacaaaaaatatagtaataataataaaattattttctatacatatgttattattaccatttaggattcttatttaaaagcaacaaaatgattaatttttaacaagttaactaaaattctaaaaaagttccgctatttatttgagtttttatttttattttcaaggactaatattttttttacgacaaggacatgttataattcactataattttaggatcaaatgactattcctcgtataaatatagatgcattagagattcacaacatatactcaactcaaatttatttatttttggactgtatactaaactcaattaatcatcacttatatggaaaaggttgtgaatgagtaggtgaaaaaataaaaaataaaaacaataatcttggtggactcatggaaagaaaaaaaaattatataatcatctaataataattttatgataaatgtgataatttttaaaataattatcttaaactaatttaaataataatttataattaaatgatagtataaaatgaattaaattattcgtgcatcaacattaactctaattgataatatgagttattagtaataaatgcgatataaataaaaataaaaggtagtaattgaattatttaaggtttagacggtcagaactcagaacagaggtgttgaaaataaaaaagatagtgggcatgtacatgtactacgttgtaaaaactaaaaagttaatcctgtgaggtaccagagttaaatacgtggacacctatcattcagtgtctcattctttccccttcagaaagaacgaacttgctctctctttgctttgctgtttctcctataatctctctgcaaacttgttcaggtaagccataatattatggattttgactcaccatcatatatattcagtcaattcaagttcttatggtatcagaattaattcaagctgactcatctctcatttcacaactcattttttctttgcatattccagcaagaaaccactttagaatcaatataaagttgggttatttcaagcttctgattccaggacagcaacaacaacaacataaaggtggttccttttatttttcctcaataaaataccaaatatcttattgtatcaaatataatcaccccctgtgatttatagttttggttcttaatttctcccctcaatttccaaattctcctttttgtcttttgcttaaaccagtgaaaattctagttcaataatttgagataattttcttcacatttgtgttatgtgactatgcaggaagtgattgatttgtgatggaagataaatatagtctaggcaggcagcatagtgggatatggaagtccttgagagatggagattttgatgaagaagaagtttgggatgttttcaagaacagaagtagtgattatggtacttctggggttcgcaagttcaaagacaaagatcaatcctcttctgttcctgttcctgttcctgttcctgctaggcctagttcagccagaatgatcccaagatctagcaatagcagcagtgctagttcctccaatgaagataaggttcttcagcaatcagcacctgtcaacattcctgactggtcaaagatttatagcactaaaccccccaagaatagtgctaattcaaggtttgatggtgattatgatggtgatgatgatggtgttgctaactatggtgggagtagtgatgaggatggagaggaaaatgatgacagtgataagcttcctccacatgagtttattgccagaaggcttgcaaggagtcagatatcctcattttctgttttagaaggtgctgggagaaccctcaaaggtagggatcttagcaaagtgaggaatgctgtactctcaaaaactggtttccttgaatcactataaaggggtctcttgagtagtgatgtagctttatggtaaaacataatcaattaatttttcatggtgtagctaaaaacaacaaatagtttcttctactttttttatggtatcacctgattatatggggtagaattgattcttatgtgttatccaaacatgatagtagtagctcttttacatttgggatgtatagtggggtttgtagttagaggttatttaggaatggatgttgtgttcatatgcttggggtatataaaagaattgtttagccatttaccatgaaaacaatgaatcaaattggttgtggcaatcataactggtttcatctccttctgttataacaaattcatgggatcagatgtgtggttttgagcatccatacaaacttaatggtgaatcataattatagagccataaaacattttgaaggatacaagtgtttttctattttactttgacactgattttttgttttcttttcccctttgttttccctgtgcacaagtccaactgtccaagccttggtctacttccctattcctttattactctgtattgaataaagattctgtgaggtgtatccatccacctttggatgaggaaagagtgataagaagtgatgggatagaaaataagaaatgtgatgagcgaaaacaacagatacaattatacaaagaaaaagaaggtggagaaggagttgttagaaaacagaagtatataaaaattattactctctacatcattgatgcgtgaatcattttttttctatgtttttaatgctattttttccccatttggatgctattacctaccgtattttttacaagaaacaagtgataatatattttagactattacttttttgttgtttttagtaaaaaggatcggatgtagtatagtattaagtgaaatcaaagtccatgacaaaattgaataacccttacacgagtcggaaaataatattagttatacaacttccacaaagttgtaatatacatagactgtttgcaattttctgagtccaataaaccaagggtttgccatttcacttaaaagttgaaatgagttactcgtttgtgtaaagctatatgagttgagaatttctaataaatgtggtataaactcgattagcctcaaataattgtttgttggtccaatttagaactacaagcatttataaatctttaaaataacgagacttcagaactctgtaagaagggtctaaattattcaatcatgttgtggggtgggaaattgacatagacattcaccaacttcgtgtcatctaataattatagactctcaatgtatagtatctaatgacgtgtgataatgcgagaagggaaggggaaacagaaacacccagtatgtaggagtccctatcaattttcagctttgatctccataagattaatttaatacaacctacgtctagtgtacgctttttgtagctcatttcaattttaaacgagttttatttttttcccaatcaattttttacctttattgtctgtttcgaatatccatgccaaaaaattattaaatgcaaatacactgattaagacctctttttttaaaattttaaatcagaaatacataactgataaaaaaaaggagaaatacttaaagaaataataaagttatctattgtgcacaattctagtagcattatagtacagtcaacctatcaagtatcaacttctttcacgacagattccgtgtttaatttagttctccaaatataaactacatgccactgtaggaggaacaaaaagtcaaatattaccaacaggatgttttcaacatatttttgaataaatttgaacaattattttagtgagacccaatatatgaaattaattcaatgataaaaaaaattaaaatatgtaactaacatatattctttattattgtaaaacattcatgtgtcttttgaatcaatgcaacctcatgtgagtttttgtatttaaactaaaaggggaaaaaaacttcaaaccttgccgtgacatataattcaaactgttttgtttattataaacattatattggtttttaataataaaaaaagttttcatatattatattgttttaatgattgcaatgattaaatgtaaactaaatggtaggattatgagtattgttttgattgatcaatttgtttcttgctttccaaatataccagtaccacaacataagggatatagaatgtacttgattaatctttgacacgtaaaataaaaatagcatcgtatttgtgtcctaaatcaaactagttaggtctagggacagagtaatagagtatgctgatttgtctcttgcaccagatgggacaacatacatagtagatagacagccatgcttcatagcgaaaatgtttgttatgaccaaaaaagcattatggaagaccttccctagaaaatgtctaaccttatatggggtgccttaattatgaagaggagctcattgatcttctcacttcacatgatatttgtttagcaacatgatagcttctcttaactaaataatccaaacttagaatggggtcgaatggctctaattcatctactatcatttaatacctaccttattctcgtttattatggttcaatgaccctacttaacaaactccttgccttgaagaatactatgtcaaacccatgaaacaaaaataatgaatttgggtctctataagccggccaattctactttgctagattagtaataccaccaaaggacaatatttgccaactattctagagcaatcctcttcctacccttattcctccatcagaacctagctactgaggaaattagaaaggtacaaaaagactaaggaaagtgtataacaggtattgcataagagggaatccctttgaaagacgaccttgattagagtttcctcttctccctaatccactgaagagtgttatttctagatctgccccattctgttgggagaccaagaaaattaccaacaatttcccaagcttcttttcctaagacactaataatatatatctcttttagtagcagtagaatatatttgccaaagattaatccagactttgctaagttaatcctttgacccgggacaggttaaaaatatggacagcttctccagcacaagtaatcccaaagataagagcataatcttcaaatagaaggtacgtaggaaagagttgggctagaaggggttcacaataaatctccatatgtaagagctttcttaataatcaattcatccttaaaatattactctcttctaaatactctattttttttataaaaaaaaaaaaaaaaaaaaaactactcaagtgatcccaaaagtataaaaagttgtgttaagtagttctccaaatattaaaaaataccttcaaaatagttcttaaactttgttaaaaatacattaacttaaattaaaagttatggttattcaatactttaaggattatttaaatgtttttcttaatttatggattatttaagggagacagtaatactttaaaaacgaaattaatgatttattctttctaaaatatttgagagagagtatttgaggcaagaataataaatgggcttgaggcctctgtaggactttggaacacatttagactgtatatgttatactagacaataaggccataactaacttagcccatttatccccagacccatatgctattagagccttctccaagaaagtccattctaatttctcataggctttactcacgtcaagctttagggctattctgtttgtgccttcgctgctcctcttcaaagcatgaaagtcctcatgtgctatgactattttgtcttgaattaatctggctcctacaaaggtactcagatatggagaaatcaattatgttatagaaccctaaacttaacagtaacacaataatctttacaataccttgaacattaaaattatggggactaatgtgtctaaagtgattacattcataagtctgtaatattaaccttccaaccatgccttactgtcacctttcaattggtgtaagcatacctatatctttggattgtagtagcatgaaagaaactcttgttattatctccccatttcagtcatttcaatctaaatctttacacacagtagtagttctacttccatagtcctcctttgattactctccatttcctcacaagttttattattatgggggtcatttcaaagaactgttagtctttgttagagtctagaaatctatagatttgcatttgaaaaaattgaagtctttatgtgccactgtagtaggtatttttgcagatttttttatttttcagttaactattccccagcatcttccttacccttcccttgtctctaccattttttcactaaggttccacaatgcttgtacttttcccataatgcctcgtatttaagttttggtaaaaatatactgttattatgtataaatactgtgaattcttgttttaatacttcaattttttattggttttaattcatataaatttttaaaaatttaaaatggtctctattatcatttattaatgacattggcataacatgtcataaaatagtcaccgaggtaacatgtcttcatacatgtcctgcaatcactaaataatgttagcgaccatttaaaaaatatataaaaatcaaatccaacaaaagttattttgaataactaaatctaaattttggtatattaactgagactatatatttaaattgtacttttttttatcacttctcatttttggaataaaatcaatgactaaggaaaagtgatcagaactcacacctaacgtagttgtcactatagttagagacctgtctagctttttctttgtagagaaaatatttctaggattattttgccttgtgtacttgtatcccttgggataggtttgtttgtatagaagagaaaagaatgaaagagaaatggaaaaaaaaatatttgaattaaaataaaaaataaatgtgagactcactattttttaattttttccccttatatagtaacctctcccccacacaatcaaaccatatcctttgaagttgtgtttgtcagcgacaagatagggacaatgagcaacgatggagtttttttaggtggttttatggagttgatttgtgagcaagatttaatttaattaattgggtgaaggtgcgttcctcctttgaaatttttgtccttggtaaggataaggtgtgtacatttatgtttgtgttttttttttttttgtcttttttatcaacaaaattgattcatttgattgaaaaaaaaaaagaaacatatattaataaggatatatcaatatttttcatatgacaagtattactgtaatgttgtgttaaggatgattacattaaacctttatttataacaaataaatatgatcagtattgattatattggataaatctaataatgactaataaagactaaatcactaattattatctgatcacaaataacagaacaatatgtaatcttaaaactctcccttaagctcgagcttgttataaatgtggtcaatttgataaaaactaaaggcgattcaagtatgtgattgtatcggataaacatgattcgatggcagcaacaaaggctcgcaatgacgatgaagaccactgtgatgcttgttggagatgtgttacgtgtcgtgtgcgtgatcatcatgcaccaagaccctatgtggggggcatgttgtggtgttttgaattggctatgcacatggatggcatggtggtctttggctaggtcgctagaaagagacaaagtgcgatgatgcgatcgctggattgtgggtcaaccaaacaacgacaaaacagagtcaaacaacaacgaaatagggttgtcggaagaagatgagaatgatggcatggtcaccacgctggaaaaggtgtcacatggctatttggccaactattagttaggtgtgtagatacaatagccaaagcaaccaaacaaatggaaatcgagccaaatgaagtaaaaataggtttttctagaaaagaagaagcatgatggggaggtcatcggaggatgggtcattcaaaaaacaacatcacatgttgattcggtgcaggcgcgtgagtgtcacgcatcagagggtggcgacatatgacagtgagatttgcgatgttgggttcgttggagggagacactttcgatcgtctaggtacaccaacgaaaatgcaacatagtggcaatgtaatagtgctcacaatagtcatgatattattcaagcgacaaaggggctgcgattgagaaaagagggaaaaaaacaaaatggaactaaaattgtttggttcgagacaatggcaagaatgaccgcttagaaaagtcattaggaaaggagaaatggtcattggaagatgggcaatgagcagaagatccaccggggacttgacagtaagtcatcgatggagcacgattttcactattctttgtgaagaataatctaaatttttataccatacaacagtattttactataatgttatgtgttaaggacgacaacactaacgatttatttataatgaacaaatataatcaatattgattacatataatcaatctaataataagtaggggtggaaataggccaggccaggctttgataggcctgagcctggcccgcatcacaatcattaagcctaagcctggcttgttacctgttaaacataagttattaaggcttgagcctgacctgcataagggcctggcctggcctgaaagcctgtatacaaagcctgattaaataaaaataaataattaaaaataaaaataacataatagatatgtttatctcataaattataaaatttcaaattcttataagttatagatatgtttctcttaattattttatgaaattttcaaggtacttttttgaagtggttgatcatccaccttcataataagaaaaaatatttttagaaaaataaatatattattttaagttttaatgtgtatatgtatatgtgtatatatatatatatatatatatatatatattaaataagccagcctgataggcctaataggctttttttaaagcttgagcctgacctttttatttaaacagacttttcaaaaagccttagcttggtctttatagtaaacaagccaggccaggccagaccaggccttaaataggccaggccaaagacccctgataagcagcctggcccacttccacccctaataataagtaatgaggactaaattactaattactatcttatcacaaataacaaaataatatgtaatcttaacattttattttcactcaatttatcatatatattttttaaaccaaacaacctaacaatactttgtttctctcctcacacaagcaaaaaagaacattagatctacctccatcatactatatgaagattggagtctcctccccactttctctatttctcatgttaaaagagaatggcattaaaatccctacataggaccaagctagcattttcagcatcaaattagatagacccagtactattccacaaaattctcctttgactaagtagggttgccataaataaaagcgcatgtattctacaaaatttctactcttattaaaaaaaaaaattaattattctgactactcttattaatttgaattagtacttgcatggatgaagttaagagaatgggtttcgacatcaactttgactttatacttacatggatgatgaatacatttttttgtataagggttggggtagctcttagtaccccttaatattaatacttttactgataaagaaaaacgtcgtctggttcaagttgagtttaggtaactaagtgtttcttcacgcttaacagaaataattaaaacacgcagttaatgggtttgtatttaattcactaaaaatagtattattacacacacacacatatatatatatatatatatatggatcagtttgaattttcaactgcataagcatgaatctcaaatagcattaataaaaatagagtcctgctatttagtgcaaaaaaaaaaacgcacgaatactcgtgcatattttgattattttctattggttaattggaagttatgaatggaaaaaataaattagtgcatgtggttgatgtaaaaacacggtgaatatttggtatattatttttcgtactaaaaagtattatccttgaaaataaattttacacattaaaatataattttaccatcagatttgaaacgcatgatcgtgcaattattctttatgaactgcacagttgatcatgttccgtacatatgtaaatggataataacccacttgagattccagatagattccttaaaactggtgggtagaaattaataaagaaaactagaaataatatgaagaacatgaacatctgtgtccatgaaaaattgcaattccttgagtgcaagctctctctcctcttccacatgtttttccttgaaccccatttctagcattcccctcatcatccccacatgaaatccaaattttctcaacctttcaatttggtcctcactcccacctcccaacatggcaccacacgcagccccacatgcatgcaacccaccgtcccttttctccaatacaacgcgttgcatgctttccacgtgttgcacctcctcaccaccgtccgattcaccctcccacaacgtttttttcacgtactgcgcgtcttgcaaccccaccgaccccaccgcacgtgatatctcaattatcacacgcaggactcgctccgggctcgcacgtgctggcccgtcgggcctcgccagcaactcaaacccgaacggaaccatcccgtccccggtgaggagttctatgttggggccgtacatgggcctggacccaggcccgtcggttagaggaaggtgttcatgggcgtgtgcattggcgaggttgagtaacaaggccgatgccgcggccatggcttgttggcggtgaccgccgacaagctcgcaggtggcgaggcatagggccgggacggtggtccggggggcggcgaaggcgaggtggaacatgggctcgaagacctcgaggggttctttggcgggaatggtttgtttgaggtgggcttcaatgtcggcctgcaaggaggcccagtgggggtattgggaagtgggcattctgagcggtgcgggcttgacgggtaaggggacacgggcttggcttgatatgcgtgagaaatgaatcttgaagttggcgttgaggagaagggctccaaccatattgagagagaaactaggaaagtaacaaaagtgaggaagtggtgttgaaatgaatgaaggtatttatgggagaaagaggaagcgttgggagtgtgaatgaagtccaaggatggagggtgttatgttatgtactaggaatgcaatttgagaagcctagttgcttgatatgtagatgtgagaggtggacctgactgcattaatgggcacaagaactaggcttaaatagatagggaaaactaggctgctatttttattattttttttgtgaaattgagctagctgctaactttatgttggttaaagcaggtttaagttcatcaattagtttagttgagaaaaaactagaaagttatatttttttttataaaggaagaaaaagttagatataatttcttataaaatcaaattgaatcttatataattttttgatggattttaatgtgtcacataaaattaaaaaactttaagatttttttcatttttctattagtggtagatctcatcttagataacttttaatctgtcctatatctcatttttaaatattttatataaatatttattaaattgaatataattaattaagtaattaaatttaattaataaaatatgtaagaattttttataaatattaagaaatagaaaaataagcataaatttattttttatttatgactaaatgttaaaaaaaataatacataaatttgataataaaaaatataacacattaatgccaaaaaaaaattattattgttatgattgtaacattcttaaatatgctctatcaagtatgtttgaagttgttgatcaattatttttatacacataacgtgtcttgtttgcaagtatgtagtaaaatcaggagagtaccacgagatgttttaaaatttaaaatgtcattgtctatgtgataataatcaacatcaatattatcactaaatgtatctcgttcgtcatcgacaatcatgttatgtaatataatgcatgccaaaattatatttttcattatatccatgttccaggcatgcgatgaaccacatataatcacgaattgagattagaggacaccaaatactcgttccacatccttaagatctatccccaagatcttaagatttatcctcaagatccaatattaaagatattcttagatattaatattatctaatgttaattgagtcttaaaagtggttaacattatcacatggataattataaataattatattaatttactcttactcacttttgaattaaaaatgtatatagtttaccatatatataagtagaaattaagtaaaaaaatttccagatatacaataattcttattctattaaacaattaaaattaagaatttgaaactataaatttattacttgtaaaaaaaattatactattaatcattaagaaactatactacgtatgaatattaaaaaaattattgtaaaattaattaatatctttttatactattagtacataggctatttattttaaaattaaaatgaataaataatttgtaacatttatatttttttaaaatattttttcaaaatttcttttatttaatatttttattttaaacggatcaaaataggatttaatctttgtaacttcaaatcaaccattttttgttttcaaaatttgaaaaatatgcagaattagtccttttcctttaacaatgttaatgctgttaaggagctaaatttacatattttttaaatgttgaagatcaaaataatcaatttgaaaattaatacagaacctaaaactaattttaaataaaaatacaagaacgaaaaatagattttacccgcatttttatttaactcacccacgcaagtgggattggctcactacgttacttaaagtatagcacaccacacatataaaatggagtagttatgtgagttttgtccctagtcaatgcttaccaattatcaaacgttaaagtggagacatagacctgccacaaaaaaaaaaaaaaaaattatttacctaaatggcatgcgaccaaaaagttttaccatgcgatataattcgcttgtcagtccaacgaaatacgtgatagacacgtgacagtcagagagtaattcattggggagcccagtgaattaggtggacacttggcaaacagagagtaattcgctggggagatcaacgaattacgtagtaatagaaaaaaatctcaaaaatttcgaacggtcataaattttgatagaaatattcgatggaggcgtataatatgtcaaaatgctcgaaattcagaggcgagcattttgacgtattgtatacctccatcgaatatttctatcaaaagttaaatcatttgaaggacatattgcacttagacgcattttttgaaaaaaaatagtggaccaaaatccccttcccttcgcctctaaattttgagcgttttgacatatcatacgcctccatcggacatttctatcaaaagttatgaccgttcgaagtttttgagatttttccattgccaggtaattcgctgggctccccaatgaattacttcctgtctgccacgtgtctacctaattcgttgggctcgaattactccctgactgctagtgttcatcacgtatttcactgacaagtgaattataccacgtgacagttgataaaactttctgatcgtgtgacatttagataaataatatttttttttgtccggacggtcgatgtctccgttaaagtgttacctaaagactaaaaagttccgtttaagtattagacacaaataattattttattttcaacgtgtttcgcgagtttgaagtgtaatctataaatttatttttcttacattaaaatttaacttttcgtaaaaggataaaatcatggcaacagaaaataaactttaaattacttaatcataaaagtttttatactgtgtcatgaattattggaagaaaaaacaaaactaaagcaagtccagtgaaatgaaactgagtttatctttcgagtcataaattcaaactctcacttgttatcttaaagtaaagtaaatgtaattttttctatgaatgctccttgggcctagaattttttgtttactgtgaattgaagtaatgtcgtcttcactgcaatcttttataagaaaataaaggaattatttcaaagttttatattgttaaacaaaaatacataaatatgtttatattacgttcgaatcagaatgaacctgattctttttaaaacggagagtttcatttttactaactggaatgggaattcatatgaaaagcataatctttttacttaaaatgagaatattttaagtgttacataaaaaagtaactaatctcttcacgaatgatctaaaaaatttatattatcatttatttacaatgtcgattatatgtattattatatgataatcttattaacttttagaaaacatatcgttgtaaaaaaaattaaaaacatatcaaccataattttgtaccctttttgaatttttaatatcatttatatgaattagcatacatatattaacataaataaaggattaataaaaaatgaaaaaatgattagaaacatcaaaatacacaaagaatcagtaatgtatatttttaaaaatatccaaaaaatatttatatttatgtataatagaaaaagaatactaattagggtattaattaataatagaaatattttatactaacattacataaaaattaaactctataaaatgacgctttattacacctaagtagactggacactggacagttgcaaatgcccagttgacaaaagcctaactaatttaattacgagttacgacaattctatgtttggttttgccgattgtaacaaaccaaacttacttttgaaatatttaatactttatgagtttaatctgtattatatatcatcactaatactactgtataattttgttcataacaaacaatgagaatttcttttaagagacacaatcaattgaacttattaatacatattagaagataacgaattagaaataagatctgtttagatacaaattataaatatttttttaaagaaaattattcaaaatatagaattttttctaataaaaaaactttaaaaaatatttctaactttatatttaaacagactataatcctcatctcaccttgatcaaattttttaacacaaacaatttttgtgaattctaagtttctaacccaattcaattaaaactagacaaatatatatggaatagacttggataaacttaatttgtttacatgatatattaatattattaacgttacatataattattttgtagaattaaagaagtatataattataattaaaatatatttataatattatttttaaaataaatattataaatataatattatatcaaacaaaatattatttatttgtcaaggagttgtattatcaatatataattattttttaaatattatactttaaaaaatgacattgtagtaggttgaaatgacctaaaatataagtctaaatccatccttaaagcaaatttatctaatttctttaacttgaactcgttaaaaaaatcctttaagaacagattaagttagtaagatgagttaggtcatgaacaccctatttcatattattccaaatactctgtttaaataagttgtctccaatgatgagttgacaaatacctataatttatatataaaaaatactaatacatttacataatatttttgcaatgaatcaaaatatttatattttaataatttcaaatcacccttttaaaaatctttatataattatatatatacttaatcattttaactgctagtctatttcaatataccatttttgtaatccttatttttaaattatattttaacagtttttttctaaaaaaacataacaatagttaaaaaaataactttatattataatttaattttttattataaatttaaacataaattatatatatttaaaaattataaattttaatataatatatttatatattgaaaagtattagtttgttataattttttattatataaaaataaaaatgtactgtataccatagtaaccatactacttatttttttaaaaaaatgataaattaaaattaatacagaaaataataaatttttccaaaggaggtaacaagtaaagtgagagtaagttgtgatacagtcagtaaaattatatcttgatgacttattgatcataaatttaaatctgaaaatagttgtttgtatatgaatggataaagtgacttacaattttcctcccccttccatgtgcgagagcctcctaagttttttttttggtcgcaagtaaagtcggcttcgtttatttcagaagacaagaaagagagagagattagaataagttggtacaccgtcaaatttggttcctcagaattgaggtattgtgtaagggcacgttctgttacatcgtttttcattttgattttggatggataaaggtaaaggtgccaaggcattagcgacctctttgcaaaacctcgatttgaatcctccatccaacgtcaaatccaagtcttccatttcactcacccaccctcaatttcccggtattttttaaacccctttttctctctttcaatctgcttttgtattttagagatggggtgttatgtttatgtttggtttttggtaaagctttcacctttcattgacccatgatcaattgcacttgctctgttttggggatcaattgaaattgaaagaccgttgacaaaacaatactaactctgaaatgcagtggttctttgtttctgtgataattttaggtagaaaacttcaaaaacaaacaaaaaacacttcaaccctcatttgggccttttactgcaattggtttcagttttgatcatattgcctggttttgtggcaagtgctcattgtttaatttggttttgcccttagactctgtgtttgtatgactagattatgctgacaattgaagctcagtttgagttttgcccctgaatagaatgactaaaatttgttttctttgaaggagacactaggtgggtgttagttgtgagaggttttggtagtttaaatgagatcttagggtttaaaccttggtggcacgatgcaccaattattttttcataagcatgtgccacatgataggcattaacaaattatttgagaaatttttgtgcaggattactgcctaagaaggcgaagcctccgagtttagtcagtctttgcgttggagttcttggaagacatttggaggatattgttgcagatttgagtgaaattgctatcaacttgccagctgatataaaggtaggttgctagagaatgattctgattcttcaaatcctttaataagtcatttatcctaatgctcatatttgtcaacaagtgaaattctaaatttatggtgttctcaatgtaaatgtgtgggaaaaaaagatttctccaggatttcccgctttctttgctaaagaaatatcctttgttgaggcacccggttaatattcttaagtggttgaaacttgtgttccgctcactgttctaaacacttctttgtttatcccttgttaaaaatctttgattataatgtatcttcccccaaaaaagaacaaaaagaatccttcatcctgcagcatgtattttatacatacatacaatacaaataaaaaagttagttatgcttaatgacagatagcagtggcagctattgctagaagaagaaaattgctgaatgatgatatcctgatcgcattagctgatacttcctgggaaatccttgatgtctctggctcagatgtctctgattttggcttgattaaagcagctgaagtatgtagattcattaaagctctagatataaggtatagaactataactttttttattaaaaaaatgaaacaattactatgctttaattgtaatgcaattgatctttgatgtctgagaaatgggaataaataagctgaaaaaacaagaattatcataatatttagtcttttcatgtatattcaaatttcagaagacatttcatgcaatatgctctagcttgtagtcttaactctgtagcttacttgatgctacaagagcatgtcatatgtcccattcaatggaccagctggtaggcacattttgagaaaatattttgctgtttgaactatatcatgagtttattagaagtgagtgatgaatgcagattgagttttatgcttagatcatcctcttccattgtaattttaattgtatttcatggttttacttctactggatgtggttattattaattttcttcacctagtttttggtccgtcaacaacttgccttgaggttagcatattgtaggattgatgtgatgctaacaatcatttttttagttttgtagtgtgtgtttttatattatacttctctctctttcagaatcacttgatatattgagactatttgcagccggtgcaccaaaattactgctaatggtatatccgagcttgtgaagcactgccacttattggagacattgagatgcgggtacatatcctgtgctatccactttaagttttatttctttgttaatgcaatttgttcattgtgttgttttagactgtattttgtctatcatttaagacataatctgaaaacttgtaattttgcttcaatgggccctttaggtaccatgttcttgttactattgtatctgtcatacttttgtcgttaggatctgtaaattgagttctcttgtaaagatgatcaaaacatatttacttactcatttatttataatgccaaaaactggctttgatataaaaaattgatgtatattctcacgaaggaaatgttatccgaaacttgggaagttgtaggtattgggaaatttattctatatttattctctcttttgttttaaaaatcaaattaaatcaaaaaggtagaaaattatgtaattttaaaattgtttagggtgctttttttttttttttttttttgttttcatggtagtaatttcctctttattacacaatgatttttgtctaataaatcacattggatacaagactgtgttttgactaggattacatcattacaaaactcataacaggcaatgaaccataattaatattgcagaggatgtccaaggagtgacaacactgcacgaagatgcttgggtatatttaaaccaaggtttgatgattatgtggaggaggattcttgggaggagcttgatacaaaagaaattgctagtggggcacaatcactcaggtggcttgtgtgggtatgaacttgaaaacttctgtctaatttgtaattgaatgcaatttttgtccttactgaaatgcaaaaattcatgtatttccttcttagtttgatgtctttgtttttatgatagcattggttggtgtagagacacataggctgcacttcgtccagccaatgggggatggagtgagaattaggaaaaaataggcatgatggataacgatttttctttgattctcattgcatatagaaaatagaagttgctagtagtttaatattttttcatggccgacatttcttcaagaagtgattattttattttatttgcagccaaacattgataaaaattctttagaggacttttccactgagtgcccacgtgttgtagtaaatcctaagtcatcaccctttgggtttaagggaactgaggttcctcgggaagcattacaaaatatcatattggatgatgaagttgtcaaggacattgatcccagaacatggacaatgcatgggtttgcattgaagcccatctctccatcttcaagttccactgaattatcagtagctgaaaaattcagacttgcatttgtggaaagggacaaccgattagctccgaagcgagctaaaaatgcccggcaacatcagcgtcgtgcagtgagggaattgatgctgatgagcacaagagccaaggcaatggtcttagcctcacaagcaagcaagtcccttcatggccgaagctcatagaattctcacatgacatgcatttttcagttgctccaaaatgtactagtagtattaacttcttctgtatttagtaagaagttgttggtcatacagattttgaatctttagatatctcctttgacaagtcagaaagatcagggctttcaatttgtgccttgtttgaggtttctcacgaaatgaaaaattgttcagttgcccatgttatggaagaaatatgattgcctgttgctttgttccatttattgtggaaatgtaaaattaattttccaacatcattgctttggaagaagctcttgattcaaaaggataaaggattccttctgcatgatatttggccggaagttattgatgtggtactgctacctaacggtgcttctgctgagaggggccttgttttgtggaatggtgtgatgcatgtcaaaactgcttataatcgactgttatgagaatggttgatgagaaaaaggacagtgtctggcaatttataccctgttttgaaatatctcaaacggagaagacacaaattttctaaagcaaaaattttagctgcaactaaaattttgatttgagtcagatgcaaacaggctttaagctacaattattgtgcatgtttgaggcaaaagtcattttgccaacgcatcaggatccttgtttttgcatttattttgtttttatctgtgtgagttggagcttcttaaattcattttcaataaactttttgatttcttataattgattttagcttgtgtttggacacttttgtaatgcaaaagaacatgtcaatttgtttgaaaagctgttttgagtccttttttattctttgcattaatggtattatgtaacgattttttatcatcaattttttaatttaatttctttaaaaaagatttgtgatattttaaatagttaagatattttaaaaattgtcacaatttcacattcatattttttttttcttctttaaaatcatcaaaatatgtaaaaaatgtcagcaaatcatattactagtcaaatattttggcatttaaaattgtcataaattactttttataaaattaaaaaaataaattttgatgattaaaaattgtaacaaatgaaaccatgaaatgataaacaaggagggactaaacttaattttttgaaaatttgagggactaatgaaaacaaacaaaaattgaaggactaaaaaaatgtttatgcctaaaaaatataaattatttatattaaataatttgtattagaaaattaactatatatagaaaaaaatgaaaaactaaaatttaataacttctaatagtaaatactactagtagtattaaactttaatttataataaaattgtcaattttatattttcacaatcataacaatttgttgaaaaaacatctaaaaaaaggtttttgttctttgaaaataaattatatatacatagcaagataattatcttttataataaatgctaaaaattgtaattaaaattatttgtgattaattaataaattaaactcaatataattttgttgaaatgtttgagtggagtagtctgagttgggttgagctgctgccacaacacaatctcatacagcgcaggaatagaaggaaaagatagagaaatgtggaagagaaccttggtcggtgccgtgggtgctctccggcggccatattcgtcgggaggtggcggcatctcctccgccgtgaactcaatgctcctccgctctctaaaggatcactatcaagaagtcgccaaaatgaacatgccccctgtaagctctctctcactctgttatgtgctagggttttactttaggtttagacattgactaactcacgtgagagtggcacgtgcctagcagaaagtgagtcctccgtcgccgttcacgatcgtgaagggagctctggactcgcacggtccggttctgaagcgcagctacggcgacgaagaggtcagcatctatgtcatgcggttgttgacccccgaagacgaggattccgccatcgaccagctcttcatccacgtcgacgtctccaaacctcagcagaacgaatccttgattttcctctgcggtttgtacgaggatgctctggggattcactctgtttccatgaggcccaaggtccaggactccggctacctcctcatcccctcccaatacaccggccctgttttcgcgtcagttctgtgctctttgctctcaatttttctttgtttagggtttatgcttgtgtagtgtaggtctggagattggtaattaaattaagaagaagaaaaaaagtatgcactcatagtgtaaaatcatccaatcacacatcacggatagtaggtttgttgatttttacaaaactatatactgtccgtgcatcactgttaaattcttaaattaatgtcattgcaatctctagagtatatgaaagtataaggtggaaaaagatatatcaaacatggacggagattccacgtttactggtgatatgatttaagtggggaacaacacttaccgcatgagttagcttttgaagttctaagatggcattggaatcctagtggttgttgttggatttattagactactcgttatcaggtgttgttattggatcacctacaaatattcaatcttgcaagctataagttgtgtgtaatttccggggtaagcatgtctcttggagatttcacgttaactagtgatatatgaccaaaatagtatatatataggtggggaatcacttctctctaagttagattttgagattgaattaagttcaaaacccaaattcttagaaaaccgagttctatatttaggtataaaatgcagattttgggaagaagcatttaatttttttgtagatattaggaatttaggattaaaagaatggagatgaagtagaatgccctccactcagaactcttcaattgctgtaaggagtagtggtgtattggctctttttatttattatagtaataactattattgaaaatatctctaccgtgcgagttacttcatttcattttggaactcaattgtgagtgtttaattaaagtcaatgtcaatgtgatgtgattgattcattttgatgctctttccctgagaaaagataggctggacttagagaagaaactgcggaattgtgttttgcattttgggagaagaaaaaatttcttacttttggaagatacgaatacgcgtgttgtcctagaatgcccgttttgtgttttatcatatacctgttaaacttcgcttggaaattcttatgttttttgctgactgacttttctgtaaatgacagagaactagatgaaaagatgagagatgcgtttcacagttacattgaggagcgaggagtgaacgagagcctctttaaatttcttcaagcgtggctatatgtgaaggaacatcgaaatctgatgcggtggttcaaaaccatgggcttgttcattgatggaaagaagccagctacaggtgcataaccctccgagagatcaagttatgaattcaaaacttgcaagtttttcaatttaaaagtacctaaagtttcatagtttactattaggatatttattttggaggatcaacgcacccacataagtacataactttaaagcgagtggtaaattttatcaatttaactctttgtgatatgtgatgtgattatgacaaatatacacacaaaatttaagatgattttttttttttaagtatcaaaatgcaatgtttgatattacattttaaaatattttatgtgacatcaaataaccaaatagtacaccaaattaaaaataagccaactataattagtaatgttcatgacttatctgtctcactaactttacccgtagttattaatgattgaactttctgacataatttaatacacaatgttttacctaaattatatttttttacttatttatttttaaaatatattataaatatattttaattgtaattatatattttttatcaagtttgtgatttaattatatataatataaaaattgatgtcattgtcatgttaacaaatcagacaatttcaatcttattctatatattgttaggtctagattaggttggaacttaattcaaatgaaaaattctattaaaatttcatgttgggtagaatcaataacattcaggcactagttaaaagggattgggagattattattcagcacgttcattgtgcgggtaacctatgtgttattctactgataaaaaaaaaaaaaaaaaaaaaaaaaaccaatgtgttatttagttttctggccaagcaaggatctaatgaactttttatgaattttgtgtgtgtgcaatagcgacagaaaaaaaaaaatccaatagtgtgtttggatctgctcttaaaatccacattttcctacaaatccacgtcaaaatctttaaattgttggagaatctagtatttttagtataaggttacgcatgtttactggtgttaacacccaaccaaacatgcatgcagtagatctttctacatttattctaatatctcactattaggcccaggggtagccacagtgtggttttagatgattttttcatctaaaccagtcgattttgttttcatttagttttgcttaatttttattataactcgaaccaaatcagcttggatcaggttgccggttttaaaaaaaaaaaaaacagattgttcaaaaaaaattaaaagaaaaataatgtataagcaaattagtcttaatgtatgtggagtacaaatggagtttggcttttcaaatgccgaatttccaacgtgtatttttttctttaaaaaataaatacctaatttaattaggtttattttaataactaaatgtattataattaatttttttaaacaattgattagtttatgttttaaaatgtgttagaattgtgaatttaggttaaaatgatgcattattattagtataaaataaaagatcaaattgtatttttttagtgtacaatatttttttaaagtcataggtaaaatattatatagttgtcaatatgataaggacatttttttcttaatatgacttttcatttcaacggagtccacatcttttggatatttccgcatttttggaaaaaatgtactcatttaaaatttcaatatttcccaactctgttactactactagtactacttcttcaacaccatatatggtgcaacaagatgaggcagccatcaatgatcaagaacaacaatggcaatgtagacaacatcctcaactcgtatataacaagcttcctccacaatgtgaggcctgtcaccatttaggatattgattttgatatagtatttatttttaattctgttgtgggaccaatcaatattaatttttatattatttataaatatataattttaatcaagatattagtttttaaggctttctgaaatacaatttgatcattttttataattaaaatgcatgcttttaatacaaaatcttaaatcttaattctaacacattttaaacccctaaaataattgaaataaaaaaattaattataatatatttaattatttaaacaaattattttaatacaactaaattaaattaatgtttaaaatgaaataaaataaaagcatgttcatttgaaaagccgaactctattgataaagcatatacaattaagaagaattaaataagttgctaagtgatctaaaaatacaataattagttgctaagtgattctaaaaatacaataatttgttgctcagaggaactaaaaatagacatcaaaatgacaaaaaattaactccataaagactaatcatgataaacaaataactaaaaataagaaaaaattatatgaattaaaactcgaaatttgaaatactataacaccaaaatcttatttaacccgatttagaatgttgagatttcggtgaatcaaaagtcaatttgggtaccaaaaaattgccaattacctactctgaatattaataaaaaaaaagtattttggtacatattttgggatgggtgtttgggtaaataattttttatgattattaaaacataaaagtcacgcttcgtatttttttaatttttttttaactaattcaagatgttatatcttttctccattttaaagaatttgaataatttctaaaaatattttcaattgaagtttatgaatagttcctctaaatcaaaagaaatcattgggtaagtctattttatttagttatataatttaatttatatttatgttttacaaatttagtatttaaatatatcttggcaaagctagagcatatgtgagcattttgaataaatatttcaaaatttaaatctatgagcattttatattagtattttgattatttagagttacacacatgaatacttgttatttttgggtaaagaagacatgttcttgaatgcttatgcttaacattgccattgtgtataggtataaaatagcaacaaataaacaacgatatcattcaataataagtactacgaatcactgaactctttcagcattattctatgttttccaacaaaaacagagagaaaaaaagactcctaaagcaattgaggttttgaaaatggttgtgacatcataatgaatataaatcaaatgctttgtatcaattggaaatggtagttttaactaaaccaaggaacttgactttcccattgaaattctgctgtgctgctgctttgtgctggcaagacatcaaagtttggttcagcttcaattgttgacaagacattgaagtttgattcagcttttgcctgtgggacttgaagcttttgacaagtaatttgagtttggacatgggcaagtgcaatttctgtactgttgatttgttcatataatttagagataatcccagcacatccataaacagggtcttgagtcctacattgtgcttcaaaatacaaagaatttgcagcttgttcacgtaagtatgatggaatatgctgcaacatcaaaatatacaaaggttatttagtaacataatcttattgactttggatgacatattctaactttgatatattgataattttttccatattatagactaacataaacacattgatatcaaatattattatctatatttaaaacacctgaagcatttttccaacattgctgccaccatagattctgtgaacacaagcaaatctttcaggatcattggcaggaaaatatggaaagaaaatgcaatctgaagggcattttcttctttgattcttgcaagctgcacacctaccagacatcgtgatatcaaatatataaacaaaaagaaaggaaatcaaaggaaaatatttggcatccaagaaagatttcttctcttctatattttgctcgtgtgagagggtggatatcttacataagatttgatgttttagttgccaagagtatttgtatagtagtagagttattaacggctactttttcaatattgcaatgcaaaaggaaagtttttaacaaaagagaaaggaccatgaatcaagacacttagtctatatcacatgaaaattaaaggaaacaagtaatatataacacatatatagaagctaagtaatcaaatacttctaatgtttttgtaaaatatacaccaaataacaaattcgtgtcaaataattactttattattttattttattttcatctcgaatggaaaaataatttttgaataacattatatttttattttgtacttattatattttttaattttccattcaagtgaattaatttttttatccaaatatatctctttgttatttcatatagtgtagcatataaacaattatataaaatttataatatctttgctattaattgttaatttaagtatttgtaataaataaacttcaacttaatatattatatacataaaaaatacagtatgtaaaaattaatttgataaaattaattgttaacaagtaaaatttgaaataactttatgattatgttaatatgaattttaatgttggtatactaaaatatgttttatagaaaaaattaaaacataaggacatattaaatgcataaataatttgaaaataattcatcataattagttgctaagtgcttctaaaaatacaataattagttgctcagaggaactaaaaatagacatcaaaacggcaaaaatttaactccataactaaaaataaggaaaaattataggaattaaaactcgaaatttgaaattctataatgacaaaatcttatttaacccaatttagaatgttgagatttcggtgaatcaaaagtcaatttgggaacggaaaaaatagccaattacctagctactctgaataataataagaaagagtattttggtacatattttgggatgggtgtttgggtaaataattttttatgattattaaaacataaaagtcacgcttcgtattttattttttcaaactttttaactaattcaagatgttatatttttctccattttaaaagaatttgaataatttctaaaaaaaatcaattgaagtttatgaatagtttctctaaatcaaaagaaatcattgagtaagtctattttatttagttatataatttaatttatatttatgttttacaaatttagtatttaaatatcttggcaaagctagagcatatgtgagcattttgaataaatatttcaaaattgaaatctatgagcattttatattagtattttgattatttaaagagttacacacatgaatacttgttatttttgggtaaagaagacatgttcttgaatgcttatgcttaacattgcgattgtgtttaaggtataaaatagcaacaaataaacaacgatattattcaataataagtactacgtacgaatcactgaactctttcagcattattctatgttttccaacaaacacagaaagaaaaaaaagactcctaaagcaattgaggttttgaaaatggctgtgacatcaaagtaattaattaaaacgtttaaatatattttctaaattaatgttttaaattttttaagtaattaacaaaaattcttcacgctataaaagaaaagtctatttatctaaataattatataaaattactttaacaacaataaatactatactaatatttttatgaaatttaatttacttatatttattttccaattttcagatgttatattaacatgtaaatcaatatttaacatctgtaaaattatatcaatataatatatatatatatatatatacgtacatttataaaattactttatactatcaaatgtttaattgcatgctgtaaataatttgtcctaaaaaatttcactgctataaattgcttattctgttttgcacaccccgctactatatataccccaccactacctattcttctcaattcgctctttttttgtttacaagtcctcctttctcacagattcgtctctccttcaacattagatcttcctagctcatgtttaattcctacttggtctaaaaaattgtgtttgtgaaagtttgagttccaagtttgatgtctctattacacaagaaaaacattttcttttcttttttttcctactttccctacgaattatatgtacttgcatgatgtaaaagaaagattttgttttaatccataaggttgatatagagatgtaatgcttcattgcgttcatatatggaaaaatgatgtatttagtgaaaaaattatattcgatgcaaaaaaaaaattgaatattttattcaacatgcatatatatctcaaacaacgttgtcactggttgaggttgttgctccaaatcatctggtgtcaccatcggctggaaaacatgcccaattacctaccatagtcacaaatgacaaagcaactttcatcatattgaattatacaaagaatttaaaaattttccactattgcaattaatcatgatgataattaattataagttttattaatgattaataataacggttttaaattgcaattgcaatcaattcattaggttagaaactaatctcactcgtgatgcgtttatatatgaaaaaatgatgtatttagtggaaaaattgtattcgatgcaaaacaaaattgaattagtaaccattacacaccatgagtgagattagtttctaatctaatgaattgattgcaattgcaatttaaaacctttattattaatcattaataaaacttataattaattatcatcatgattagttgatagcaacgaaatctaacaagtatttgagataaatatgattcattatcatcgtgatggattgataaacgtatgcaaggacctttgatgccttcactaatctggcatgcaccacagggcacagggtaattgtcttcggcaatagcatccacaaagcattccaattgctgaacaaggggaggggcattgtggcgaacgcagtggcctggtgacggtgttgtttgtttataagatatattttatgaaattaataacatattcagataaaaaaatttaatttacttgaatagaacattaaaaaataatttggattctcagttacggagccattgatggtgatggatttaggagggcagacagtggtaccctatacacaggcaattaggttgtgataccatatagaagaaaagaaagatctgaatttattgatgtataagtgaagtacgagtcagtttaatttgttacataaacaactaaaggatatatataacattgttatgcaacagagttattgtttgaacttaaagacaaatgcatagagtttattttttggatcaaagataaactgaagtgcttgtagatattcagagatctagggagagctagttccaacaaacttcacctcacatcccttcatttcttgaatctttaatttcttcacatggccttgtaattcttggaatctccaacattattattagcactgctattgcaagcacctttggtggacgtgccttcttcttctctctttctttcttcttctctctttctttggtcttgtcttctgaggatgctattcaaaatctcagtgtcgtcatcctggaggaatgaaaataagtgaggattcttttgttgttccagtgtaagccaggcacggatacccttcctcaaaaatatatcaaccgaatcaccttctttctttacagctcctcccgaattcttttcctcatttgccattcttatgtatctacgttgcatattagagtttcatttctctactctctctgtacctatatatgagtatacacaaacctaacaaattttacaactaatcaaatatactaatttaaaaaatcaaagcggaaaaactggaatattaccaaatcatccgcagtatatatatattttgatgcgaaattgtcaaataaatttatatttatattttttctttttttataatcttctacctaatttttttgctgaattgcagtaaaaaaaaatattagtgaaaataagtatgcctatatgtcataaagcattccagttgtcaaacaaggggaggggcattctaggtgcgcagcaacatgagcccgtaggagagagacttggcctggttggaaatcaaggtaagtgctgtaaaaatgactaatattaatacgatcttaaagatatacaatttattacttgttaacaattaattttatcaaattaaatttttacatatggtatttttaacccttaaaataggtccttttatttttaacttaaattagtttaaagttaatggggtttgcttatatagatccactaaaaatattagaagatgatacatgttactactaaaacactttttctgttgaaaaaaaaaaaaattcatgttttatttacaccaacataaattaattaaaggcgggatcatactaactttgaaattgagtcttcatttggagtggaagcttcaactctatatcctgatatgaaatacaccatgtagtttagtaccttaatcagtttaattgtctgggaaacagtcctagttgattttgttttcttggtggaatttgttttctgaataaatggaatcatgtaataacgtggacttgttgggttgtgctcctcaaaggaaccaatatagaaactatgtataagtattctatgataatttttgtacgtgcttgttgatgccatcaattttaattttattttccttatatgaattcagcgtgaaaaaataaatttggatatgtaataaaaaaaaattgaatgagaagggcaacatgttttgcttgatattctcacccagtaatagataatataaaatttatacgttgatatttggttttaccgtcaatagattaggcctttaccgtggtaaatgctttaccgaccttggaagcgcttgcctaaatccaattgccgccaaaactgaattttggtcggttttatcaagaaaagtttattttttactagttgaattcggttcagtttatcatcaattcggggttcttttttttgcctagccctacttataggttattgtgttgttactcattttgacctgaagttaaggagatatcgatcttcatgatctgggagctagctaacagaaggaatggtttgaaaggtcttgaaactaatcaagttttgattgaatttgtcttgtatgtcgttggtctaattgttctcaagttaatgttgatcaaacttccgttaacacataatttcatgatatccttaaaatacatacatctgcaatgaattaagaaattatagcttgctaatatttccttacgtatttctcttcctatgtccaaattttattatctgcataatatgtatatgaccatgaaacctgcacagttagcaaacttggtctttatattatgaaaggctaataatcgaaagttagcaaatcacagataaaacaaatctgtcatacctctaaatgcagcacactttacaactctgaattcagcttctaacattatatttttaaccttttcaataatttattgactagaataagtataaagaacatgaataatttcaaaaattagaataaaactagtttaataactaaaactgaataacagaaacggtaaacaaaatataacctcccaaagtaactaaatctaatttgaagattatattttgaaatcatgatcctgccacggatgtattcacaacttgattcttaactagtgcaaaacagagcttagaggagagtctgaaggaccaaagatgcagcgtatcaccaagttttagatcattgtgacacacaatctcgttccatcccttggtcaagttgtagacgtagcttctctccatttcccacttcttgaagcacatgttgtactctctcaaagacggatccaacaccatcactggcatgccagaaagcctcctatttatacctcgacgctcgtttaaggaagactcctcaggtggtgtcagaaatctgttggcaatctttgaaggtgggatcgacaagcgagcttgctgtgggttcaagtctgttttgaaaagttccttctgcgtcacaaactgcacgtcacatccattcaactcttggatcttttcttgaaattcccttggcaatccatcaagttcatcaggtggcccttgctcataacccacatttctttcgtttctagcatcttccctttcttggaagcgatcttgttcttcttcatatgcagtaaataaggccgccactacatctagtaaatattcaaactttgatttgccatgttgtgaagaactagccccttcgcattcgcttttggctctctttgatgggttataattattttctaattctttttcgacttttctttcgagactgatctttgcacccatttcaggatgccgcaggtgcttttcttttgctgcaacaaagtcacgaaccaccgtcttcattggaatagaagctgatgaatcttctccatgcccgaattctttctttccacctgcagtacccattcccaagttgcacttttgcagattataagatttctttctttttctaatgatctcctattatcctccttcacctctctaatatatacacggatgtaaaaagataatcagcaccgtttgccactctaatgtagatataactactctgtaaccgaaagattgtgtaaaaaaacttaataaagataaatcataagataatatataattatgatagtaaaatctgatctaatataatattgtgtagataaggtcacaagataactaaattttattataatgtaatattgtcaagtaaaattatatttatattctttcttttttttataatcttctatctattttttttaattgcattgaaattgaaatatatacaagattgtaattcgaatttagaaaatataatttaaatttcaaaattatatgttttggtgatgtaaagttatagagtattttattttaaataataactttatttaaaacaaataaaacacgttaattttaatcaatcataagattttgttgttattggatttataattttaattttaagaatacaattttaattaagattgataaatattactgtaatattaatattcagagtatttaaaaagatagacatattcagtttgataaaatttatcaaaagtttaaaattaaaattataataacgattaataattttaaaaataaaaattataaataaaaatttaaaattaacaaaaaatttctcaatgtgaaattacatattgttcaaggcataacttgtttaagaaataattgatttatttaaattatgtgttcgtttttataatttaaattatgtatttttttataatattgtttttgtacgtgattagactttttcttagaaaaaaaatattattactaatatattttataaaatatttttggtatatttcaaacttcccgccacaagaatacagatataactgttgtgtaacataaagattgtgtatagaaaacgtaataaagatgaatgataagataattatgatagtaaaatctgatctaatataatattgtgtagataccctcctatagatattgataagataactaaattttactcaaatttaatattgtatattctttcttttattaaatgatgcgaaattatcaagtaaaattatatttatattctttctttttttataatcttctacctaattttttttaattgcattgaaattgaaatatatacaagattgtaatttgaatttagaaaatataatttaaatttcaaaataatttgttttggtgatgtaaagttatagagtattttattttaaataataacttcatttaaaacaaataaaacacgttaattttaatcgatcataagattttgttgttattggatttataattttaattttaagaatacaattttaattaagattgataaatattactgtaatattaatattcagagtatttaaaaagatagacatattcagtttgatacaatttatcaaaagtttaaaattaaaatcacactataattataaataaaattttaaaattaagaaaaaatttctcaaatttgaaattacatattgttcaaggcataacgtgtttaagaaataatttatttatttaaattatgccttcgcttttataatttaaattatgtatttttttataatattgtttgtatacgtgaatagactttttcttataaaaaattattattgctaatatactttataaaatatttctattgatatgattcattagattaagttgataagtaaatatttttattgtttgtaggactttattttcaattgtgagggatagtctgtagccttcacttttgtgacaaactgggactgcaacaatgctgcttcaatcttcaacagttctaccaagtgaagagttattgctttaagagactggttgaccatccaaatgttatcaatatcagttactggagttatggaccagaccaactccatatcgaaacccatgatatatgttcctgtttgccaaccggattcaatcaacaattctaaatgctaatatagattaaggattatatttgtcaaacaatacctttaaataggctagttgatcatgttggtatatggtatctattattaacctctttttatttgatacacagtagaattgattgagttttaaattgattttagataaatttcagatattttttcatattaaataggagtttagaattgactgtgaatccaaaattgatggagttgaaacaacttttgatatcttttgcatgggatcaacaaattttatataaagttttattcctaatttataataaaaactttcaaacataaatcatagttttagaattatttttaaccaaaaatcaattttgtcaaaacaatttcactcaaaattaattttgtcaacgctcatctaaacatgcactaagatgtgggtacttggacattccaaaatttgttgtttggttgagaagaggggaagcataatagaaagagaaaaattgtgactcacatgcgaatctcgtacattctactttaattcaaatatctattttttttttccatcttctctgttttcatcctttcaaccaaagacagcataaaatctagactcatttgggtatgacttggtttagcaaaaataattattcattggattaaggaaccttggcttttttgtgttgaaacttctaatggactaaacttccgacattttcttgaaagtgggactcactggtttggtgatccaaaccagcacgtgctaccccatttaacgttacaaatttatgcttctctatcactttaatgactgatagttatattttcagcaagctacccaaatttgtgttggatgttttgagtgtattttggaagtttcaaaggaatcaagtctcacattggcacatttgatcagtttttcacatgcagggttattagagcactgctttcttgtttctatttctgcattttgtatttctggtgtcttctaggatgatatattcacatatagattgtctgaactctgagctgtttctgttagaattggcacacaacttgtcacttgtactattcacaaaggaactgctgttaatagtggtcactacattccccatatcaaggatgaaaaaacactgggcaatggtgggaatttgatgacaagcatgttactaacttgggtttgtcaatccaaactactttaaaattagattagatttaaacttaaactcaacacattaaatgttaaagtaaataactactgataagattagatcagaatttttctcttcaaaactaatttcaattcatctaatctgcaatcacccttacataacccggcatgactccacgtggttgtcatcagacatggcactaaccacaaaccgtaggccaaccaatatcgcttcaagaagaaaacgaagggctagaaatcataaccagcaacaaaaatatttcgccttttggcacccaataaatatttcatcagtgaaagtgcaattcttaagaaaggacaccggatgacgggatgaggatttcaatttaacaaactgtagaatctaacttggaaaaccaccttccctaggcaagtccatttattattagtgtgcctaataaattacatgtggactcaataataaacttcaaagtgaaaaggaaaccaaaaagagaaataagagttgaccacaagtcacgcggagcatgtaactcaaaacaaatctaaactacaagctttacatgtctaagatgaatattaactcttggaagcctttatctgaagcaagcacccatcttggctgcaggacacacaatctagagacatcagaatagcttgccttgttgttgggttccactcctcatcatggtacaaaattcttcatagttgattctaccatcctgagaaaccacaaaattgagtgtcaactatggatagaactagagtacaaaattgtagtaagcaaaaagaaaaacaggcttacattatctgcgtcaacttcggatataatttccctgattgtggcctcgtcacccataccatactccttcatggctgtttccagttcatctcttgtgatatacctgtgatggaatcaaacaaaaatcagggtgcatgtgtcattactctttaaattctaaatagagctattcattatttaatgattctgtaatgtatgtgcttttgggtgtaggaagaaataggatttatggtatatgatcttgttaaatacttattaaaaaaactgaaaacataatccgatagtcaaaagattaatatggaaggcatggacttcaaaattgaggttgagaatgcatagtaggaaaaaagaattacttccataatgtgacagattgaggaagaaatgttaattcacagtagatggatttacccgctgtcgtctttgtcaaaatattggaaggccttgtaaagatgctcatctctttctaacctgtgtctatgcattgtagcagtgatgaattctatgtagtcaattgtgccatttccatctacatcagcctaaatttaagcaaaggagtgtaagcttgaaagaatatagaaaaagcaaaggagggcaaatcttgtgaattcaacaatagcttacggcatccataagctgtcgcacttcagcttcagtaagctttgagcctagtctttgcaatcctgccctcagttcctcataggtgattgtaccactattgtcagtatcaatatttgtgaacattgcctttaaaccttggatctcttcttcagaaagattttcagcaatgacctaaaacgattatttaagtccactcagtttatttttgaattggtagagatatgtacccctacaccctatagttacacacagtcgagcaatttaaagtcattatgagaacactggaaaaaaaattatgtctctcaatgtttaattatgccatcaaatacaataagcataaaagagcattgtggtcacttcatgcagcttgtggcttgactaaccttgagggctagtttttttagtttattcattgctctgaattgcttcattctggaaagcactgcactgtctattggcttgtcagaagcatttccaccttctttaagccatgggtgctctaaatatttaaacaatacaaggaatcaattagtaaagaaaatataattcatgaaccaaaaaattcttaaggatgctgcaatcaagctatcagtcagcagtaatattaacgggaaacagttttgagtcactgcatcaagacaaagacacacactgttactagcttccctcgtgttcaataatgtttcattttctatcacatacagaatgtcctataactaaacaactgacatgtttaaaggatagataatagaagaaacagtatatttgtgaaaatattgtctctgaaaagtccctagtctcagcaactaacatgttcaaatgcatcattggttgtcgttgtcacacctatatgggtatagaataatctatacagatggaaagatcttggcacgtataagtttttaagccctaaattcagtttttatatgcaacattactattagtaataactatatccactagccttgttatgtgttagatagaagtgaagggaaaattagttgggaactagagtaattagttggaggggatcaattagataaatatggtgaagggtgaaactgtgaaaggattcattcagagaattaacaagcttgtaagaaagggggaatccttagaggagaatccatgtttcggttcgttttcattcaataaataaaatcaatctttgggttgctaacagaactggaatatatctaagcccctttagtgatctatcttctcaacctcacccaagtacacacataaaaggatcaagtaggaaagaaattcaaactatcaatgaggagaaaacacaataaaagtctcctacctagaacctgagcagcagtaatgcgtttctttggatcctttataagcattttgcgaacaaggtctttagcactgtttgatatgcttggccatggattactttcaaaatcaatatgaccttgcaatatggcatcaaatattcccttttccgtctctacatcacatattttattaaaaaatagtcaactgtaaaacagggggaggctagcctctaatacaaggaaattatcctattatcaacatatcaaactcagagtttacctgcccaaaatggtggtacgccgctaagtaagatatacaatataactccggcactccatatatctgcttccttcccatagctacgacgtagaacttctggagcaacatagtaagcactgccaactatatctcgatacacctttcctgtgaagaataaagaattaatagaaaaaacttagtatgttttatacaagtgagatgatgtataaaataagtaagcgaggtttatcaaccgtcaatttcgtaaacttaatttactttaaattaacagtagataaaccctttctaacaagccatcactttacaatttccatctccatacttgcaaaaaaattaattcataaatcatggcacaaattgagtggcaaagatgtccatctactgaaatgtgataaagtgcatgcatagatatggagaaaaaagaaaaaggagataaagctttagaaaaattagttggcagaagtttattcaaataaacatcttgagggagaaaaaaaatatcccatgaaacaaattaaaagctactcaaactttgcaagtcttgacaatcaggccattgatgtcaagcattggcaatgcactattagaacttaatagaaaaatcattttcaatcttacatgccttttgcatccaattcccccccccccctccccttacacaaacacacacaaaaaaaacaaaaaaaaaaaatggatggaaattatacaaaattttcctcaaaaactttagaagattattcacaactatgctacagttcacatacttacctttcaggaatccccacaactattaaaaattcataagaaaagaccaatgaatggataacaaaatataccttcttcaatgaagactgacaagccaaaatctgtggccttgagatgtcccttgtcatccttactggatagcaagaaattctctggcttgagatccctatgaatgacacccataaaatggcaggtgttaacaaccttaacaatctgtctacatattgaagcagcagccctttcactgtagtggcccttggcaataatcctgtcaaaaagttcacctccagcacacagctccataaccacatgaactgattgtttatcctcaaaagcacctttgaactccacaatgttggactgtccactcaaatgctgcatgatttgaatctccctcttcatgtcctccttgtcagctctgctcacaagcttcctccttgaaatggacttgcaggcatactgcaggccagttgaattctcagtgcagagataagtaaccccaaattggcctctccccaattccttcccaagtgtgaagtgctgctttacatcctcaaatggcttcccagtgattgtgtcatgcttgtgaacatgttttgggcttggtggaggcctccagggtgcctgaggaggagcatgtttctcatgtaattggtatggttggtgagaagggggtttggtttgggtggcaaagggttcatggctcttgtgattgttgtacacaccagcacccccagcaccggcaacatgtctgtaaccaatgtgttcttctggctctgacccttttttactcagacaacaacccatggttctgacaccaaaagggaagagattttttaagttttatcaggtaccaccacacaaccaactacttgaaagtgtgaagattcagtcaaagaatgaaaaagggaatgaacccagaagagaattcaagaaagaatatccattgaagtgtgaagagagagaaaagggggggaggggggaggagaagacaaaggttgatgcagaatggatcagaatatgtggttttttaaaggaggagaggaaagtagaaagaaagagtctcaacaaaaaggataaagatagaaccgagtcaactgtgggattcggattttaacgagttaactaaaaaagggttgaaactattttacgaccaaaacaaggttagagccttggagggagtccatataatagaagaaaaacttccttgattcattctttcttatgattcaaggaccgaatcagagatgcgtatccaacaccacatttttctcctgattcgttcaccacatgctgccacctaatttttgttaatgagtaaccaaaaaaaaattatttagtctaaggtttttgtttttgtattttttatgttcttcaaggactaaggtgatgctgctctcatgttcgtatttggatagacttttgcatttccaataagcgtaatgaaaaaatttatctgagatagtataagcttcgcacttaagatcattgtgtcaagagaaaagaaccattgataaaagaatgttgaaaaatatatttgtaaattaaccaaatcattaaatagctgtggaggtcagaataaataaaaaaacgctatggagatactatgtgtgtatcttagtatgtgcacaattctatggattcaaaatcaaattttataattttcataaatagcattatagattccttatagatcataaaaatatataatcataaataatattgctcatatctctttattttggcaattacattattggaaatcattaattattaatttaatacaatattatattttcatgtgcgtctattatataaaggttgacttaaatgatccttaatttaacaaaaaaggaaatgtgtgcaatacacttaattcttttgaagttgaaaatcttctaaaattaaattaacatacatctttaagtagaaatcaacaattcctcaaattgaatcctgcgtaagaactcaggatcagcatgccactctggggtcttcaatgaaaaaattatgcttccttcgataaagtgtgagacattattctaataatttagacgttacatttatttgtaagtgttttattttattttccaataaaaataattctcatgaagtcatactaaaaaattgttttggttgtagagcattttctcaatattaaaaaaatgacaagtgtgccgagaaattattattattgttataaaatgtgtttttggttcctgaaattttagtcaaaattaaccttaaatcattttaaaattgtgattttcatctttaaatatttgatcaaaattagatttagtttttttttttttttaaaaaaaggtttttaatgtcacatggcaaacatatgatatccatatgatcgttattagtcatgccaacaaaatattaataaagttaggatgagagactgaattcacctattttaaaaaaattcaagaaataaaaccaaattcaatgaatttttggagagcctaaattatatatttaactcttttattttcatttaaattgtcaatcaattaaaacaacataattaacaagtaataagaaaacaaaacaaaaaccataaaggatagaaacacttctcctaactttaggtttaaatagagtttatctcgttagttttcatacgtttaggttcatcttccatgtttgtctcccatgtttgtacggaccttttgtcatcttttaatacattttaaggctagctggtttagttagattattaaggtgtcaacataattgaaatgtcaatatctagttatagttagtctctattttacctcaaaaaataaaacaaaaactagcattttagatgaaatattatacaagctaaatttgtattagataaatatttattcttataaaattataatttataataaaaaaatatttataatttattaagtgtattataactaaattataataaataaatactttttaatatataattacattttaaaattatattgaataatttaaattatctttgaaaaacatattaaaatccacacaactcccccttctaattagagcatatttaatgtacatattttgatgggtatcttatattctaagatacagtatcaataagaggtaattttttctgtttgaaataagaagaaaacaaagaaaaaaaacaagtgtgaatcttgcttcaatttttttccctcccataagaggaagtgtgatggaagaatagggaaaaaaattcaaaaaataatccttgcaatgcattttatttttataatatttatgaagaaaaaatatatttattttttaaaaaaatcaaataaaattaatgaattccttttcttttcttttttattcatttttttctcttgttttttctccttcgccgaatatgctaatcacaaataaaagaaatctactcgtaactaaaagagaaaaataatgtgcttgatgacggtgatatgatggaaattaattggaaaaatatgatcatcaaatgaaataggacacatgtgaaatgtaaatcatgaaacgtggacacgagacaatatataattattatcatttgcgtagtagttaactctgaagcaagaaaacgtgtacacgagcaagcaactcattcacggtttttatttcattcaaatcatacactttctggtcaaattctcagacccccaacagattctatgtttcaattaaaataattctcgcacttttgctttattagaaacactgagtaaagaaattaacgtgagagaacacaatctaagcgtttcctaactttccttgcactttatttaatagaagtgaaataggtaaaaaaaaaaaaaaatgtcaagagagatgaaattagatggaaaattaaaaaaagttgaattatttgattaagtttaattaataaggagagaaattaaaaaattgtaggcgcgccacactaaaaaatattttcatgctaaaatgataagaaatggaaggaaaatatacacaatacgcgttgctttaaggaacacttcaaataaaatcctactttataatttttaaactataaaatgtttttttcatccacagtaatagaaggtgatattaaaagatttatcataactcataaatcttactcaaataattgaactagactttcttaataaatgattttatcaagttttagtttttatgtactaaattaattaaatcatagctctgaataacaatttattgggactttaaatctaactactacattgaccgtgttaacttgatatttcttaattttgaagtaattattactttaacaggaaaaaaaaaaattatttgtcagtatacaacattatgaaaatgtttagttttcaagtttttctttgtaaataatacttagggtatttttttatggaattatcttgtatttttagaaattacgttcccataaatttgtagtgaggaatgttattcctaagcatatataaaaatatgtttggttaacttttaacatttctaataatatttaaggcaatttttgtttttcttctaaacgaatatgatatcgagattttttattggagcgtgattggtttttttcagattaataaatgataaataaaagtcaatttggagctttctcatcccattagaatgggaagaaaagttgtagacataggaatgtaactttcttgagaaaaaaaagaagctacctttgtagtttattctttagcttgtaattcaatagagaatctcaaacactattattttattttgtgcccagttttacagtttttgggaataaaagatattcatgaatattttctgataatttcttattaaatatgggaataaacattctcacctttatatttatgaaaatgtaagataattttgtaaaacaaatgttattctctattaattctttatctcctttttgtaggattaatttttgtattgataattgtaaattaagttatttgttagatgaataattattgaggtaaaagagaaatacacacaaagaactataattgtccgatgctaaagatgatgatacacaaaccatggacctaatcacataaagccttaaaaaatggagcacgtttttttggatactaaagatgaatttactttcacatatctttttgggtaaagcaaatgggtatgccctttcttccccctcccggcctcctcatttttgggttaattatttacaaagtggttttgcttttcttaattcttctgtgacaataataaagctatgtttaagtttttgaagctacaaaagaacttagctttcaagtcacaattaactttcctagcccgcttggctagttgagttgctaaagcaacctttattttgtggagatgccgattttattttgttgtgttataattttggttggatgaatacttgagtgtcgttatgtacatgtttagggtttctttaattaaggggaaaaaacaaaatcttaattagtattattttttaaatcgtcaaaattataaataaaaaaaatcttaacaaaaacatacttatgttaattactatgtttataaaaggcaagcaaaagaccaaggctgcaatgtctttgtagagctatggcccatgaatctaccctatgtaatgggagcaaatttgtggctgaagtgagtctgttaaaagtgatacaaattaagggacagtgatatttcctcccttgtcttatacaaatctttttgctaactaacatgccataagttgactatttagcatttcacatgctattctattttgataacttccaagaaaattgccattattgattgaaggttagtgtttattttttaacaattattaattgttattttgttaatttttattattattgagagaaatttgaatccataattattttttctctctatcattattttgtactgccagaagtaattattttattaaaaataacaatataaattaaccaaatcatgagaaaaattatcataatatatttattgggtgtatacatctagtgaaagataaatgtataaaataaaaatctagtgaaagataaaaaaaaaaatacgtaaagagaagtaaaaattataaggagtgatgtaatgttatataagaaaaagagaggtacggtagagaaataaagaaaaaataaattaaaaaaagtgtaaaattagcaatattgttaaaaatcaaaatcataatcaacaatgagaaatcacacttttgttttttggaatctttcatttcactttaaaatatcttttcagctaagtgctaatagctaatggctaataacctaatacaaacgtgtaacacatttacccaaaaaacatgtggcacttcacctgatcttgagaaattgttaggagtttgtaaaagtggttattattttattagtttgtaatatttgttgaaatgttattttatgaacgtttaagctcataggtttctaattctttgaagaaaaaaaaaagttattttcatttttatctttattatattatgataactcttctaatattgacaaaatgttgatactttctcttattctcattaaatatcatttctttaaaagataaaattattaaaattataatataacattatttatattagttcattacattaaatacaaaaaaataaaataaaaaaataagaataaaattaacgtactagttatgatgtggtgcgaatatatatatcatggggctacgtgtgcaagagaagataaattaaacggcatagtaagattaattgaagaaattaaaaagaataaaacaacaattttattcctacattattattgtttctgctaaatagttcctaaagtaaagaaattatataactaatccctcaggtattaaaaattgtattacataattcccaattataaaaaatatttcaaattaattcttggacgttagtaaaacatgttaatatatggaataaatttatgctaattcaatattctaaggattatttatataatttcattagttcaaggactatttagaagagagaatgatacttgaaagactgaattataggtttactgaaataaaagaagaagaaaaacacaacgaaacataaccaataacaaaaatgcttcttctactaaacaggcaggtatataagtatattgaactttttgattgggccaatagaacttaaaatttcagttgtgaacccaaaaaaggcccaaaaccatcttttaaacaacctaaacacattttatgtaaggtatgaaaaagactgataacaaatttcagttgggacagtaattttgatgatcaaaacgcaatagtagtaacacatttaatttctgataatatcgtggaagtgaggaatgaagttgccacttctcaactccccagaaatacgaaaatcttgtcctggaatagtgtgataaattgaacttctatactccacagccacacatatatattatatcaggggcagagtacaaactacctaaaaaactagttacaagttaaaaataataattagtaatcgaaaattaaaaaattagtttattaaattatacgtatttttcataaaattaattgttgaaataaatgaaaaatataaaataacaaaaaaaataataaaattataatttatttaaaaatgataattagaaattttgataaatatattacatataataatagaaaaatataaaaaaaactaaaaattaaaaattagtattttaaaaaatattattttcaagtaatgtttaaaaaacactaaaaattattaaaaagatattaaaaatgatttatttatttattaaaccctcaaacaagtttttcaacttataaaaataagttaaaaactaaataaagtatgttctgaaatataacctgaatcttaggcatacttgctttgacatggaggagggacctgtctcaagattggaaagtggttttgggggcacacccaattcacgttttacagaactctatcggtgtctcatgtatgtttgtttcataaatatgtaaacatttacttcacataataattgtactttaagatatttaaaaaaaaaatgtactttagggtttcggaaatatattaaaactcaaatcatgtacaaacttctcacaagttagtgcagattttttgaattagatggtggttggaacaataatttgtggctggatttttctttctaaacgaagttgcttttcaaacaatatacaattaaactgtttttttaacacagaaatagaccaacagtgacatcaataataaataagtaaataaaatatgtaagaaataaataactagttttaaaactaaattaatgagggaaaaaataaagctaaactcttaagttttcatctccctcgtagtcgtaggtctttctattccttactctcattttcaatttataacaattgtcaatattcctattccaaatcaatgattggctaattaagattaaagtcagtaaccctctccttctttctgttttggcagttgatacgtgaaaatgaataaacgcatagcttcaccatccataggtggaagatctctgtgctaacatatgttttcattgctcttacttttttgaatgaaggcctcatttgattgattgattaaatccatacaacatgtgattaattaataggacataaatattgataaaaagagaaaggctcgtttttttatcaaatcaaaattcattttaattcagtgcaagactcattaattatatatttatttttgaaaaaattaatcatttaatccaaactttaccttttattttctatatataaaaccaatatttttagtctttatacaagtattttcatattgtagttgtcgttataaatagcaatgactaaaaaataaagtttgtataatggcagggactaagagagatttgaaagtatttgtgcaaagataaaacgatatgatttttaagtatagagattaaaggataaaatttatgtaactacaaacaataaataagtaatttttcattattttttatgagttcctttctttaatatgtttaacaagtattttaacttaatttttaatttttttattagttaaaaaatgtttgcttgatcgcattaatagtctttggtaaacaaacttattttaataaaatataacattttgatttttaccttcttatattttatcatttttattccaaaatatttattaaatttactttattatctttttctacatatcataagatagggttttattattatttttccttccattcatctccacatccaatattgtgattgacgtcatctttaaaaattaattaaaaactataattataatttcctaaaaatactttttattcaaagtaaacttaaaatatgtaaaaaaaaagtctactaaaatagaatttttgccccttatctttatatagataactttcaaattcagatgtggagtgttttctctgcattaatatatataaagatattatgtatcatttaatttaatccgatagattagatatgttcagttctttaaatcaaaattcgagacttaaattaaattgatcaaatttttattttttttcaatttgaaccaaaataatgatttaaatcaatttgagtttttttatactaaaattagttaaaatttattgaattggggagttgatgaccatcctaccatgtagtacatatggagtttgtatagtgaaaagacaaaagataaatagtgtgttttctaggctttaaatcagatatggaatgtttttttttactaaaatgaattaaaatttctgtgatgtattcaattgtaaatagtaatctattaaagttattgccaaattagagcgtgttaactatgctttttttttataaagaaattaattactcaacttatcattttaaactttttaaaataatttatataataaaaaagacagttattgaggtcagcccaatcccttacctaaaaactttataagacgaaaaaaaaaaaaagaggtcgacccaatggtaaaggctattaataaaatttacctctgccaattactctatttacctctctttttctttttcttttttattttgttattcaaaatacccttttgtatcccatttttccagtgagggtcaacaacgtgaacaatttccagaaccgtccacctgaacaagttcggaatggcaatgcatgatgatgaggaccatgccatagaataacaaaataatacaattaactctaatcctatttaatatttaatacacattagataacaaataaaataaattattgttatacaaaattattattttatttatatagctacttttcttaaaattataaaaaaaataagatttttaaaattataattatatataaaatatataaattataatatacatattgagggagagagactttatcctatcttcttattactggaagaagcttatatcatttgattctaaataagagtctcaatacaagttgcactaaaataaaataaaaatatatattaactggcatgaaatcttaacaacatacactttagcaaaataatgagtaacataattcgtttctcttctaatgtaattaacagaatagttgttaatatagaataaactgtctctacacttgagaagaatggaaccaaattcagtttgtacatattaatttttttattgtgcacacacacacacatatatatatatatatatattaataaaaaaaagtaggacgaagaggagagaggtgttaaacttttccaattaaaaaatatacttttaaatgagaataaataataaaacgaaacttaaaataaaaaaaaaaaatagaaaactgaaatagtagaatatttactttaaatgaaaattttaccttcctttatttttatctgaaattatcatattaggatcttattatttactttttattcttatacttcgataaaaaaattcaaattattttttaactaataaatgtgaaaaaaattataaaaatctaaaaacaaaaattttaaggtatcttttcatgaataaattaggaagaagagaaaatagatgttaaatttatatttacaaataaaaaataatttattttgttaaagaaaataataaataaagggaaagctatataatattttattttgaaataaatcataataaaatatttatttaaaatttaattattttatcttcctttatattttatttataattatcactaggattttattatttactttttattcttatgctttcatataaaccttttaatttttttaactaattaatgtgaatgaataaaaaaaattataacaatctaaaaaaaaattacctatcttttcatgaagaatctaggaggaaaaggaaagacaaattaaaattttatttaacaacaaaaaaattattttttaagagagaataaggaataagaggaaagttatctaatattataaaaatatatattaattaatataatatttactttgaattaaaatttcacctttcctttttatctaaatttaaaactaggatcgtagaaattacttgatttcgttccaatgcttttacatatagcaaacttcttaaaaaagtttaactattaataacattaaacgaatggttttctaacaatctaaaaacaaagcgttgttgcatctatttatgaaaaaattaggaggaaaaggaaagagctgttaaatttttatttatagataaaaaataaattattttccacaaacaagcaagaaaaatggaaaagtgatatgataatttttataaaaaaaatctcaagcaatagaatattttctgtaaataaaaattatgccttccttcctttcttatccaaaattattactaggatcttataatctgcattttgttcctattcattcatagcaaacttttaaataatttattaactagttaatgtgaataaataaaatatcgttaacaatctaaaaacaagtatttgaggtatcttttggtgaagacatcaagaggaaaatgaaagagatgttaaatttttatttataaataaagcaatttattttctaaaagagaataagaaataatgggaaagatatattttttcttgaaaataaaaactctaataagagaatatccttaaatgaaaatttcaactttctttttttatccaaaattatcactagggtcctattatttactttatatttctatgcttttatagcaatttttaaattgttttttatttgttcaacgtcaataaattaaatactttattgaacaatatatcagattctttgaaaatattagagaatatctatttgacgaagttataagattaagttgaatgacttctcaattaatatgttatatgaaccctcccgaaacaaaaaccatttatcttatgattttattgtataaattgatcatatctatcactcatgattgtaaccaacgtccaacttatcatatgataattactcattgatttttacattctaaaatcactttgaccataatattataggagttgtccgctctatataataatccattgattactacgttctaaacccactttgcccacagcattgtaagagttgtttgctttatataataatgtttattctttgaggtttcaaaattgatagagcaattttgagatgattggatctcctttttgaggatgacactcctttctccctcttgcctttaccctttctctgccacatgaagatggtacccaaagccattggttggatctcacctaaccctaatgcatctttgcctcacctcaactcatccttgttacaaccttgctcttgtgcagagcaaagttggattttgatgcatcttcaccataaccttggttttacatggagagatattttagatttagtgtctatagtgttactcgattaaacctttttacactttatccttcaatttggtgtttgttgttaccatggttgttgaaatcaagatcttacctaggattgagtggggaaaaatgtgatttggatcataagatcctacatttctttcctaaaatacttataaataatatataacttttatttttatttttctttaatttcttatatcatatattatgttttttagtttatcatattattatattctttgttatgttttattttttgttaattacacttataatactattatatttcttcttattcttcttctttatttattatattatatgtaatattttacatttttaaaaaactaaattggactttaattaaggcccaacaaatcaaatatgaaaaataaaataaagaaaaaatttggcccaattcccttgaaaccctaagtcctacatgtttctcctataaatgataagtgtcatcagccactgctgtaaaagtccaagaacaagtgcaaccctaattccttatggtagacagagagcgtagatagaagagtactaggaggttagcgactgtaagaacagaggttgtttggcaacaacacaacaacgacgacacgaaagagtccccacaaagctcgcaaaatacctttatttgctcacctaaattgtttagataggattgcatatcccacatgaaagagtgcaaatttaatctgatctcgcactccaacgatcctaacgacgatgcaacatagagatgtcttcaaaaatcgttgaatcgcacgttccgacaatcttgattgtgattctaacagcattggctactgcatcagatagagcagtgattgtgggtgacaattgttgcttcagtgccaatttggatctggatctcacttcttgactttaacacttcatcgagcaattctatattgaggtaacactattttgataactcaactatatactttaaatttcccatcttttattccatgtattgtatttttcatttaggtaatctattgcttttgagcgattgttttatttatatttttttggtgttttgacttcagcggatacttttttgtgttgatttgattgggatttttggagcattgtttgtttttgcattgatcttatgcatgttgtgacataaaatggaatgctagttatgggcagtagttggtgcctcgatggaggtgtggatctcagtatgcctctccttcacacttgctagggtttccttccatcacatcttgattttgcaactttgtcacacaattctcaatggaggtaacatcatttcgataacttaattgtgtacaaaatttccattttttgttccacgccttgtctttttcattttggaattctattgcgtctcgataattgtttgacttttgttgtgtttttggcttcaacgaatccttttgtgttgattcaattagtatttttttggagcattgtttgtttttctattgattgagtgattgttgcaacacaagatggaacaattatttcgaacgatggttgataccttagtggtagagtggatctggactgcctctccctcactccatcttccatgcacccactaggtttcccttccatcacacatagatttggcaatttcatcgtgcaattctctgtggaggtaacactatcttgatactcaattgtgtactatgaatttcctttttttccatatcttgtctttttcatttaggtaatatattatttttgactgattgattgatttttgttgtgttttggttttaataggtttttttttctgttgattcaatttgagactttttttgaagagttgttgtttgttttgagctttggtttagatttctggtgtgagagaattttgttttggaaattggcacgtattacatcgattctatttagaaatgatgtacaaaaattacatccattctaacataattaatttgaaaaattctaacattttacattggctgattcgtactagcgatatagaaaaccccaaataatcgacataataagggagatgtagtagtgtaactgtgtgtgtaatctaagagcttatttagtgaaaagatttttataaggataaaataataaatattgatatttaaattacatatgtaaataaagctaaagaagcatgtcttttaaatctaatgctagatatacattgtatgataatgccatatatagtgttaagttatgtcttagtttatatatatggtttggattaataaaataattgtgtatgaaaatgaataagagcatacaaagaggaggatgagtggcaaaatcattgctttggaccaaaaaggaaggagaaggaaagccatattgaatcagccaaccatggcataaaaaacaaaggaaaaagatatgaaaccattgatttagctgaattggtcttcggattagaatatgactctgaataagataatgacaagtatgatgagtcatgttatcaaaccaagactaagaacaaacccaactacagaacactcaagaagctaatgccattaacttggataggtttcataagttgatgatttcgttttcttaattgttttgtaattgggtctctttctggtcttgatttggtaaatatggctcatcatccttatcatcatcagattcagagtcaaattttaatatgaagaccaatttagctaaatcaaaggtttcatctcttttttctttatttttcatgtcatggttgactgattcaatatatctttccttctccttccttttttggtccacaacaatgattatgctactcatccttttctttgtatgctctgattcagtttcacacacaattgttttattaatccaaaccatatatataaattattgcatgactcaacattatgtataacattgttttattttttgttattaaatttattaaatatcttcacccttacttctcattcctttttttttttaaacctttctcaattatgtactataaaatagaaaggcttgaaggagaaaggattgagagataagagatctggatatttaagtaaatttaataaaaaaaaaaaaatgtatatctaatatttatgggagatatgtttaacaattgcctatagtctttttgaaaactaaaaaaaggtgcgaacttagagaaaagatgtatgtaaataacatgggcccaatcaaaactgttattagggtgaaggatgggcccagcccatgaacccttggagcccatccattttaagggaccaaaatggtaaatgagtgcctgagataagggtagttttggtaaaaagaagtgactgttgcagcaaagaccccccaaaaacaaactccaaggttgaagactttgacagagtgagagtgtaaggtagagtcagtcagagatatagaaatggcgtcgtggtgcggtgctcgtagcttccagattccggcgatggaaggcagcgcactgtgcaaccgtgcttcattggccgccggggtagggtgtttgtcggtggtcggcacctccttctggcgctcctcttcgtcaccgaagcactctttgccattcacatgcttgagcatttcttccgaaactcgtaagtacccattatgaagaaaccttcaaatttttaaacttttacttttttgttataatggtgacccttattgtttgtaggtattaagaaaagtgttcaaaccgaaggggcacctgcggctctgggaccatattctcaagcaatcaaatccaacaaccttctttttgtgtctggtgttcttggccttgttcccgaggttttttaattcacttaattgtcatcacttcctttaatttatgatgttcgtttcttcagattgttgatgtgtgttttgctcttcaatgcagaccgggaagttcgtatctgatgatgttgaagaccaaactgaacaggtacagaatgagacaacattttatcttgtgatattacattctttgaatgtcaattgttgtattgtatgatggtaacattttattgatgttgcaatgcacttgttgattttgttgctgacatttgatataattaccctttgtagcttcttaaaaacatgggggaaattcttaaagccggtggtgctagttactcgtcggtcgttaagacgacaattatgtatgaattcctcactcatttgtggttggggtttattgcgtttcagcaagattactagtttttgagtttttatttcctgcaggttggctgacttgaaggacttcaagaaagttaatgagatctatgctaaatgtgagttctgtggtattgattttaatttttaatgtttccttgacagttacattcttgtagaaggcgaagcttgcactaacttgtttaggtgtgaatccatttcatattgcagatcatgaaagtcctgtattgacaaactgcttaactgtgctaattactaatgaatttcacttctgataataatttgtactgtgctgtaaaaattgatcctgctgcatttgtgggctgagaatgtgttagcctgtaggtaacatacatgtaccatggctgaccactgaccagcttttagattcaaaaccttcatgcttttttatgatttagtcttgaagattcacctgttagcttgtcataataggtaataggttatgttgtcaacttgtcatatttaatatatactaagggtgattactagattgatactagagagtccactagtaccatgctgaaaatattaaggttttccctttgggttggtattatttaattttcactaatgcctacagttacttaaataattttaatttaactgcttttccaatgatttcagacttcccttcacctttccctgctcgttcaacttatcaagtagccgcattgccattggatgccaagattgaaattgagtgcatagcaactctataagcatcaattgtaatagtacatctggctccatcagcaaactcaggttaataatgcaggaagggacatatcttagtattgaagttttacttagttttgttctttggataatggtgctcttgtgattacatttaccatccaagcgaggtctctaatcttcggattctctctcaaagattatgcacctatttaaagtgaaagaaacttaatcattggatgtttcttgtttgcagcttttgtgacatcgaatcacataagacagaccatgaataagatcatttttaataaatatattttactcgaactcacatctattttctttagattgatttgtggacgttacattgaaaaccttatagtacgtactgattatcttctttttcttcatattttgttctttaactaaagatatcatttggctgatggttagatatgaattccttttgaggtactatataagtcactgaaatggattgaccaattcataaatataagtaacagaaaaagtaaccgatatacaattagtaaagattgtttattaattaaacgacagagataaacccgtttcacttctctccctaaaatgagaaggtttactgtagacgatcctgatccttgattagtatccgttagtaacttgtttttccaattcaatcttttgtaattttgtttatattatcatttgattagttatgcttaaatttctctaccgattttataaattagtttgcattttattaatttaggttttttttcccaaggtataatattacatttccaaaaatcttatccccaagaatactatgtttacggatggaattttaataaacatgtttggtttggttgacatttaataattttagaaaaatatttaattaaaattttgaagaagaaaaagtagaggaaaaaatgtggaagaaattcaagaaagaagtaggaatatggagttattttagaaaagaacttttattttcattaaaatgttttatattcctaagaatcaaccatacgtggatatatatatatatatatatatatatatatatatatatataatgaagtaaacttgagattgtgacattcccaaattcacttttctgaaaataatttgtgaaatcttaaatcaaatccaaccttaatatttaagctgttatgtttttttctataatattttccttaatttcttgtgttaacaattctcgcttccctaaccaagtttatgaatacaacccttagatattgaaaatgtgtaacttgttttcattgagaaagagggaaagaattcaatctgagttgaacgatttagagcatatttgactaaatgttagtgaagaagaacgtaaatttgtcaacttatcatgattctttcttttatattggaatgttggatttgtctcaaaattggtaagacaataatttgaacggaaaattaaacatgcactcaattattcaaactatcgacaaacatttgctactttgcatccttaaaagctctggctcagattgtgtttttgctacacaggccttggattcttataaggaggattaaggcttccggttgtgcattatatatgaatatctgagaatcgtataaagcaatttgccttgcatttgcatccaatgttgttcttttgccagttttcaagaataaagataaaacgtaaaacatctttaacagtgaaactataacttttctccctctatcaaagtctgaaaaaaaaggaaataaaaaaatataacgggcttgcttttttaattaagcaacgttacttttttaagtaaccgtaattatacatagatgttatttttaaaaaaaatattaaggtaagtgacgaacattaaagttattcataaagttgcctttctcataattatataactctatcgtgtcaatttgtacagtatttaaatagaattttctatccatacttataacagaaggaaataaaaataaaataaatcatatttatattctgtaagtaaaatcgatttatagttttcaactttaattatgaaggaactaaataaaagcgctttttataaaagttaaacagtgtaaatactatgtttggtaaaattagaataagctaattgacttaataaaaatgtttgataagattaattgataaatatcaaatgaggtaaaaaaatatatttagtatttttaatatttaaattttatttttaataatttatcatcttaaaaagtaagatagtaatttttaaaattttgtattataaaaaaaatgatttttttaaaaagtaacattaaataaaataaactttattagaattctcttgtttaaaatcattttttaacatttaaatactttattaataatattattttaaaacaaaaaatgaaaagtgttttttaataatttttcttatatattcatttgataagaagaacttagatgtgtatgtttctcacttgaaagactatgaaatattatacaaatcatatattgtttagcaaggtaaggggttttttaaattgaattaaaaggtaaaataaaataggaatgataaaattaagaagaaaaaattaatagcttataagttaacttatttttgataaactatttcaaataacttatcaaaataagctatttaaagtagtttatgaaaaataagctattaaaataaactaatgtaccaacaaacttattttagttaaaggaacttatacgttacttaaagaaatttataagttccttaaatgtcttatcaatcataatcgattattctaatttatatatatatatatatatatatatatatatataagaactcattttattctcttataaattataaatacatattaaaaatttattcaaacaagaagatttatttgctgatactttctcaagaatacattgcataaaaaatgtggtttcatcggctagactatcaccctttcttgcgagttgcgaggattaattcccatcatcggtaacaaaacaaatataaaattacctgttaagaggagaaaatactatttcaattaaagataaagtatgttatgaattaattttgatggattttggacgagctaaatgagagggtcagctacccagcaaattttcataatattcaggtttgattagggttcataggaaagagcctttccgatatttgaaagaaaattgccattaagtacatgagtaaactatattacaaaacaataattagtgttttttagcagtataaaataaatagttttacttgctgaataaattaatttgtaagctctatggaggccttgtcatcttaatacaaaatgagtattaaaagatccattcaatatactttgcaatttccatgcatccacatcaaagatggtagcttgaaaggattctattatagcctacgcttttatccgatgacctttttttgtacgcactgattcttttatggttggggaggggattttgattatctctacgcttgaaattaaggatttcatcttcatgcgtgcatatgcttttattcaaagaaagcatgcacttttttttgtacgtattgattctttttttcttcttcatgtgagtgagggttttttttgtttttattttattttatgtgagtgagggtggggtgggggataatttacccattgattgttctgcatttgcataacattagagtgtgttagagaatatatatttagttgttgtgtaattgagagaataaatataaaaaaattatatcaataaatcataaataatcatataagaatgtattttttttacaaacaacccataaaaatgtattaaagagtgtatttgtaggatttctccatctattagtatgacaaaaaaatttgatgacatctcataagatacatacgaagaaattaaatgatatttgttactatttattgattatttaaaaaaattcttcccgcaaaaaatataaaattttaaaatattaaaataaataattgtatttttaattcaataattattttaatttatgagtatttgtttgaaaatgccaatttatccaagtgattaaagatttataatttttaccttctttatgagtgagttccaatttttctaaggtcactttttcaatttttccactttatgtgcgatcctcctctgggaaatcccccgatacctattggagtgtcttaccattgtaccatttacagtgtcaaaaaaatatatccatgcattgtaatgaacacttgatttatacttagtgttttatattgctttaaaagtttagtacatatttggtaataacttttgtagttttgctggataaatattatgtttaattttttttaaataaggtatagaaaaagattttttttatagataaactaatttaaatattcaattaactattttattgttaatataagttcttgatattttatcctaaacttaggaattaagttttcttaatgcttattttttccattatcaaactttatcttttagacattatttatacaaaaatattatactaattaaaaaattaaatttcagtaaaaaaataatttgtatataaatttatttatatttttatgttataaaagaatattttttaaaaaagtaaaaaatatcaagtgcaacacacttctccctgatttcacagtactctggggggggattatgcatgaaaattatatttttttatttctcttctcaagtaaatgcttaaaatttgatatgtgcatcctattcttgtttttttattttcttcttctctgtttacatgaaaaaacataaaataaaactttagaagcattggtaatcacataacggtatcacataacggttcttttaatgttttttcattcataaaatacatatggagaaactaaaaggctattttactaattctaattattcaaaaatgttaaaatattaataattatatttttaattcaatagtttctatttttatttataaatatttgtttgatggcacatgtatttaaaagtatccatgctttatataactaaaaaagtatccatgcactgtattggatactcggtgtatactttcaagttacaatcttttattgctttaaatgtttagtacacatttggttataacttttgctgaaaaaacattgttttttagttctctaaatatatggcatataaaaaggtttttactatagatagactactctaaatattcaattaattattttattattaatataaattcttaggatttgattgtaaactttggaattaaattttcttcatctttgagtcattatttattatttatgcaaaaataaattatttgacataactttcttttaattcttttttttaatcacaactattctctattagaaataatcatattcgataagattatattgagccacaaaactatccatccaatgctcaatatttgaattcaaaatctctaatatcagatgattcacatgcttaatgattttaaaaatattttttttttatctttctttcaattatttacatgaaaaattacttttatttaaaatactttgcaaaattggttcattcctttaagttacaaatataataaatgttgtgaatgaaaatatcatatttgatcggaagaagagatattactatatctttttttacggggtatattactacaactaagcaagtctgttttttaaataaagattattctcgctatcttaaatatattaaaaaataattgattctcgataattaaaaattagttacaaacaattgcaccgattttacttttttttttcctttgtaaaatactttttattaaaattaaatatcaagaatcaattaaataaaaatattaagtaatgtgaaattaattatatttgggaccactaaacatgacaattttcccagacgggagaaaataatcatgagaaaaaatggtgaatacaccaataaaattatttagaaaataatacttttggataacagagaataaaatagggaagatgttgcgaatgctaggtgttgggcatggaagagagtagtggggcatggcgaagaaaatgacggtggcatctgaacgaaaacggtagcaatcccgttaagttaatgttaattcttttgacgcataaaaaggaaaggaaaacgtttcttattcaaataccaataccaaatccaacacacctaacaagcttggttcgtattcattctctccttctcctcagaccaatccctttttcaattctcatagcatagatctccattttccaattcaaacccttttctctttcttccctttcttttcagaatacacatgcggtgttgctttagttattgtgttttagattttgaatatggttcttctgtgattgatttttaggttggtaagtcatctacaatctgcatcatggaaggtgttattctgagaagggtcattccttcggataacagttgccttttcaatgctgttgggtaagctaagcaatggaacacaggccctttttttttggaattactgctacttgtacaaattattccacttgtgatgttctttctccttccttttggttttgtttaattgtttcagatatgttatggatcatgacaaaaaaaagctgctgagttgagacaggtaattttttttttcgtgtattcagtttatttgtgaatttgcttctagtgccaaggggtgcttcatttctggctggtcaacttttgcctcaagatatgtttttatttttggagtaaaacatgttgttggtccctcaaaatatatagagattcagttttaatcccacaaaatatagagattaatatgtttttagcccctacattttaacaaaaatttcaaagttaaatatataatcttttctactagaaaaaatatcatttttcaaacttgaggtatcaaacacaataaactcaagatttggactagtgaaacatatcgtagtagtgttatcaatggcgggtggtagaacatggcggaagggtaaaattcctccatgtaaacacgccacagtgggcctctcttcacgaattgcctatggtggttggcaaaaaatctgccacgccatgacgcctcctttaacaacattgtattgtagaattcattttcaaatcaagagacctctctacaggattggaagcaggacttttcacccaactagttagagttcctccaaccgtgtcattctcgaagtgtgatatgacactgtcgaaaacaggaggttggaatgtgttgaagcatactataaaatttaatacatttttattccctactttttcttcaaaaacatgtgtttttagttcttgacaagagactaaaaccacttcacttttaataaatataagaactaaaacatgttgaatttttatagggactaagaccaaatttctagatattttgagaaatcaaaaacatatttttattctgaaatgttccttgtagtcgtagacatatttttattaaaattcagtaaaaagagattttggaaaactgatagttggcttttcaatcattaaaatggttgcaacaaatgctaaggatgagtgaaatacttagatattaatatattagataagatatatctagtacctaataagatatacatcttatcttattttctgttgtaattggctctatataaacattcatcctattattaataaagtaagctgcaatctacaacatttcctacatggtattagagcctaataattccaggccaatttttttctactgccatgtcttcttcacgtaccttcaaaatcaatgaacgcctgcattccgcagctgttgctcataccacttcaccagctcctcttgtggcttcatcatcctccacaccagcgccacttcctgatctcacacccgagatgatccaacgtatcctgactcttgctgaccaatgcaagcccatgtctgaacctttgtccaataagccattgtcctcctcttggcttattgacagcggtacttcccaacacatgaccggagacctctgtttccttacagatcttcgtcgtattgaatatttagttattttttatcttcatactgcatgaagaatttttcagatgcagctatgactaataaatgcgctttgagcatttttattttacaaaaatccgactttgaaatattatatatggctcaacatacctatttttcgctagctcttgttgttttcaattcctgacatgagacttaagtaacttctctggtagatctccatattttgtcatcaattcatcatatgcacttgtattatggtccatcaagccccatgctgtgctactcaatgctttccatgaaattacatgcaactaaaatcttgtcatggcaaaatatttttattttcagatatgaaattatatagtctatcatttaagaattaccagtcaagtggaacttttataccattgtattgcctaatatccttgcattttgagtatgttatttcattatttcttacatattttgacttaatatttgtgtgctatttgtcatttgacatgctaaaggttatagcagcaacagtagcaagtgatccacagaaatattgtgaagcatttcttgggaagccaaacacagagtattgtaactggattcttgactcggagaagtggggaggttagttggcctatgtttttcgtaatcaaggctattttaaataaaaagttagatggaaatagttaccaattttcactctacaaattggaactgctacttttggtgttactgtggtgagtgtatgaatgtgtggaaaattcatttttatttgaactttgaaggtgatgaaactcactcaaagataggttgatttaacatctgagcttttaataaactttgctaagataaatatattatggagtatatatgagtaaaatatattattttcctgaaacgcagagaggcataaagatttaattaaaatttgggaaattttatttaaacatctggatacccagagaatcttctgcgacaattgtttaaatttcagttttgtttctaaaattaggcttttgatataaatttggtgggtatagattttgtagttgatgaatttgacatgggtttcaaagggtatttcaaactcctactagcaaatttaacaataaagcactgttaactttttgttagtttgatgtgctaattaagctctatatttctttgtgaaggtgcaattgaactttcaatattagcagattattatggacgtgaaattgcagcatatgatatccagacaactcgatgtgatttgtacggtcaggttagccactattatgcaatctatatactctcaagttttgcaacctcttatgactgaacttttctattttcactttttgtgaatacttttgacaggaaaggaattattctgaaagagtgatgctgatttatgatggtctccactatgatgcattagtggtgagtaatttcatataccagattttttttttatcatccattccttctcttctccgaccccaattagcttgggttaaaggtattattgatgttgatgttaattcattccttctcttctgtgcattttttttttgtggttttggaggtgaattgtgagattacaagtgtatggtatttatatttatctactacacatgaaacaataaaaaaaattaaaaagttaaggttcatatgtatttttgttttcatgttgcctgatgattactcacaccccttgtatgggtcagatgtctccctttgaggaagctcctgaggagtttgatcagaccatatttgctgtacagaaaaacagaagcattggacctgttgaagggcttgttctaaattttgtgaaggaccagcagaggtagttcgctattcttattgaaccttcttaaaagaaagagataaatattatcatatttagataattgaattgcataaaatataaatcttcatatttggattctttatatatcagatttgttgtgaatatcggtacctaaaaggtcttctttttgggcatgtattttaaggtttcactttcagaggagttgggatgcatttgaatttcgaattggattgtggaaatattttctattttcagtaataattacaaaattcacctcaattcatgtttttatgtgcaaatatttaaaaacaaaaaataaagtgaaactaatgacatttttgtaattgttagtgcaaacagaagaagacatttttgcaaatccagtgcaccttttatcaatttagaacaagaacatagtgaatgtgccgcaaagctgttaatatatatacgtagactgataagttgaaaacttcaactttgccaatttctattgtcaaacaatacaggtgaaattatgcacattttttaagtgaaagagatagttgggctatgtatcttgtctgccagtaggaacgtatattttaactctgcaataatacaaagggaagtcagtttgttttatcttgcctgatgtaattttttttaatcttctcaatttaatttcgatatcatctcgaatggcctctcccaattatttctgctacttagtatcattatttatgctatgcccatgatgctaatatatcatggctacactttctcaggaaacggagttacacggacacttctaacttcactctgcgctgtggagtatgccaaattggagtgattggtcagaaggtgatccctcagtacctgatgctttgctttattctatttacccaccttagcctattctcctttgttctaatgattctgagtactttttttttttgaacatttcaggaggcagtggagcatgcacaagcaactggtcatgttaacttccaagagtatagatgatgcactctgttgatttgaatgagataccaagttcatgtgtaatctccgtggatttgaatgaacatcattgatgaaaggtagttgctttgttgcagacaataaaactgaataatttctgcatgagaattgttgtggcaacttgggttgtaatattagttccttggtctcgttccataatgactgattctaagaaactcaactctagtggcagactagataaagaaactaattagtagtcaatttttttttttatattctcttcctggtaaagatttttacctaatgtatttcacttattttccttttataatttttagtgcaataactacataaactcacgctactattttaaccttggccagtgttgaatgcttttgatactatatataaatcccttttaacgatagtatataacgactctcgaaacaaatttacaaacacttgttctagccgtcaagcttattgttaatcatgaatttcaaatgttgatttatgttgggagaaaataggtattattaataaaaacagtgaaaaattaagttgtgagttcattgtatttatataagaaaagaatatctaagatactcaaattttcatttatgtcatctatggattttccaacagaactacatatgtaaaaagcatatattattgtattgacttttggattcactttataaggacatttaagactaaggtagaggataagagctcaaaattaacccttggcccaatcctatggttataagaaattttgttgtgattccactgtgtaattgtgttctcaccctagtcttgacttcctcatatatatcattgattgtttgaagatgtgcaacacaaatttctttcttctttatggccctccacaatatctttctaagtatttgatcatatgtcttttctaagtcaataaagaacatatgaaaatcttttttattccaacgatatctcctcattaaatgctatagcaattatattgcttccatagtttacctccaaggcataaatctaaattgttttagtaatatgagtcttttttcttaatcttccctcaatcacctttttctcataacttcatcttgatcgccaataatttgcataatcttttttatatcaatattcttacaatttggtgttagagtatcactgcttcactcttctggaattttcttgggcctcatactcataaccttgttaaacaattttttttttatagaaatgtgccaactgatacctttctcccaaatcttacaataaaaggcgtaattttggtcctcgtcccttgtgtttaacctgatagaaatttacgtacttaattaaataacttctaaaagtaatttttctgtctttctatagtgtcttgtacttttgttccataacaaaaacaaagattttattgtcttcatccttagtgcacttctttttttatccaaatcttgactttttctctctaattttagcaagcctgtagagtgtagtagctctagctccacttttgatacctaaggcttggcataatcgaataaaagcttttagttcttgcttcagttcctttttggtacttttcttaactatcacacattttctagttttcagcattctaacacaagaatcatgctttaaaacaattcattttaatcttaactttatcttatacacttacattccatcatcaccaagatgttttatcctcaggtccccaacctcttgattcttcaagtgtcttttagctatttttccaaccctttatcccatcatgactttttctctttactcttttcccacacattaatgactaagattctgttgagtagtcaaactctccctaagtatcactttgtagttcatgcaaagtttttttttttttatacataatttccttgtaaaaaataaaacaatttgagaacaagtcatcccacttctgtaggcgataagaagatgttcctccctcttcctaaaacagtacttattattgcgaaatcataagctaaaaaaataaaatcaagtagtgaatattataatttttatgaagttcaataatgcatgtacccaatacaaatgctacaaaagctctgcaacaaggtcattatcacaatgtgtcagtgttattactttaaatttttaaccacgtttcaattttgaatttgttttaattatatacacacatctgtcgatatttttcttgtaataaaataatgatttaatccattcgcaaattgcggtgaatatatacttctatttttttaatgaatactcctatcagtcgtttataatacaagaagataaatgcaacatatatatcaatatcatattcatgggtgaggatgatggggaagtcaattttattttgaaaagcaattacaagatggtgatattgatatggtatatcatgtcaagtgaacattactcgtttactatactaatatcattgtagttgttagttttaccacttaccaatagaaagattgtcatcttgtaagcattgagatcgagtgggtgacgtattgtgtgcgtgtgcgtatacagggtgttcttttaaagatgatgaggcaatctatatggcatatgaacgtcatacgaaccaatgaaaaaatatattgcactacaaaaaaatatttaaaaccttatggaatttcttttgatcggtatattatttatcattaaataaataaacatccaataagtttcaatacaaaatttattaattgtcaatagttgtaatagaaaattactatagtgaacgcatataaaagcattatttcaaatatagccatataagtacttctgcagaagttattcagcgatactcgggagagggaggataaatctttttgatattttattataaaataaaattactaaaattaattcaatcacatttttatccaatgccatagtcaccttaaaaaatcatttttagtgaacatgtgacataaatttaaacaaagctattataacaagactcattcagtcaatttttgcctgtgaaaatgcataaattggctttaaatttaaaaaaattatgctactagattacctgtaagtagttttttcttatgttaaaaatgtctgtcctaacttgactgaattggataaaagtatctttgcagtgtagatttttttgttaattttttttcagatatgacattttgagctttttatatcaaataaccaacacaaaattttaaattattttatatcattcgtcatttttaaaaaaaaaattgagcaaataattcatttaaaaaaatactttaaatcatatgtagtttttatatactattaattaagcaaaataagagaatattataaaatgaaaaggtaatataatccgagtaaattatttttaaaattaaagagtgtttaattacttttaaatttttgtacataatcttaaaatgatacttattttaaagttgaggaatagtaatttgttgttataatagtcatattttgggtttggacttggaagtactgccggcagactagaatacaaacatttgtggtaggacttaggaaataggagcagtgtgaactcaaaacttgagatgtaattctatccacaaagctctcattaattcatgattgatcaaccaccaaatttcgatagtgacgacaaagagatttagttgccctaggaattttggaaggttttacaccatattttagaaaaatatatagaaagtgtgtaatgctgaataggcatcatacctactactccaagcttagcattaaatgatacaaaccttagttgtaggctagagcatttgcacagtttaatctcatggtgttgggtccatgacttgtacttggtccaactttcagatccaatttccaaatcaatctttttttccatcatgtgggacatgtatgataaattaatagtgcaactcatttcaaaattgccaatgcactgcttctcttcaccccattcaattaatctaccatgttttaattcccatatatgtactactattcacagcactgccatccattgtcatactgttttactaattcaaagatgaaccatatgtgggtaatattaggcaacgtatcttgaaagtgatagcttcccattgtttgttgaaaaaaatatccatttttgtttgaataaaaattactcgcgggccctaattaatccaccgtttaacgttacttcatacaatatgtaaaaaataatgagtcagcttttaggagaaaaaaaatggtaaacatagtccaagtcgattagccatcaatcagaaatatataaaaaaaatatttgtaattttttcatccttttcgaagatcttaccaagccttaaaaaaacaactctccttttctcgtcaacttcaatgctgctattatagagactaaaaaactaataacaaattgtgaaagcgaatctcacaaccattcattcacgccactcgccactcaagttgaagaatgaaagtggtggccaccctggacacaatatgtatggtggagcagatagaaaaacatgttacagaatctcatcacatttctcaaccccacacaaaaatttatatccctatatacagtcatgaacagaacataccaatggagttcggtcgagcaaaagaatcattcttcacaataagtaaatcaaaattcgaattcttattagaaaaatatattgttttattgtggattattatctattgaaagtaacacatatcagaaagacaaacaaacaatttaattgaaattatttttataattcacatatatctttcattaaagacaaagcatgatctaattaagtaaaaccaccaatattcagatagcaaaagtctatttctcaaaaaataataattaagatgaaataattttgtatcaattaataatataaatagaaattgagaaggacgagaaaagtaaaaagaagatagtagatcaagataaatcaacctctaatagtgatatatgtagggtatagcatcaaaagggtactaaagttttgtatttacaaaagaaagaaaaaagtgtaagcacccatccacccaccctggttacaatattaacattcccctagaagcacagaacaaaaacaaaaccctagtttatgatggaaggattgagccaattaataggcccaatacactgctccaatatctaattaattaagttaatgatcttctggaatgctttgaagagcaggcctccatggacgttgaagagagtgattgatcatcaagtgcgccaaaacctgttccattctcaactccttcacctccactttgccaaccaactcctccaactgcttcttcgttatctttatcttcacctctctcctccttttcttaacaccgccgctctccgccgccggaaaatcctcccagtcctcgtcctcgtcctcgtcggtggagtatccaatccgcgattcgcgcctcaagcagttgcccattttgttttgtgtggctttatgaattgcaatgatggaaagtaatagctaagtgggtgatatgatattaccaatatatagagagataggtaatgaaaaaattaaatgagaaaatgggaaaggtcaaacctaagtagtgccacgtaggatttcctaggtggcaagtgtgggcccctttgactctaacggacttcaagttcaaggtatcttacgggatcacattctagccgacgcttagacttcgactggcgcggctctacttgcttttgccatcccaataaaatgtcttataaataatgagaatgagccaataattttttattttttattttttatttatctaaaagaatcgtactcaaataccaggtgatccacagtaactcacggacgtaagttaactttcataggacttttgtaacactatttttattagccaggatgattttaatttaataaatcatttcgagtctaaatttaaatatataattgagttaaatctctagagaaataattttctcatcaatttaaatttaactcgagtgaaattatattttgtataaaatagttgcattctaataaaaaaaaagcaagcccactattattaaattaattacgttatttatttcactttactataattaaggattttttctaagtctctaataaaagatatttgtgatttagacaaaaaatatatttcttctcaaggttctattcaatatattatttattttattattttatacctgaaaagcaagtaccaagtagggcgaatttttttggtgcatatacagtaaaattaccagatattttctgaaaaaaataatgagtcaaaaattgtagaacaatattgaagcataaatactgataagacgaaatttagatacaatttcataaatatttttaattaaaattaaaggtttatttcagtaatttatattaatttttaatgaacatatttattatttaaattgccgaaataaaataatattattaaaaataattacagaattgtatttaagtttataaattgtgtatctttaagcaatctagtggcatgcaagccatgaacagccgcgaagcacaagtcaagcccctcaaagttcaccaattaaattattattattatttttgtcatgcagacagcaatgaaatgttcaattcaatattgtttcaggtgtgaacatgggcatggtaggaatctagcgtaaacttttttaaatgaattatctatattcttttcattatttttaattacttaaaaaggcatttccaaatagacaaaaacgaaactgggcatttccaacaacgataaattgttgccaaagaatttttttctccttgtatagtatgtagaaaaatagttgttatataattaaactcaggatacaaatctcattttcatttcccttcaaattgtgacaaatgatcaagaagctcgtgttataactttatatgaaattagatgctactataaatttattggaaaatgcctttttatgttatgagacaaacctagttgtcttttttatacaaataaattatagctatttaagtatgcggttaaactttaattttatattccatgtcagattttgatcaaatgtgttcttaaaaacacacagcttcatcaaaatatatatatggagggatcataaagtgataataaaagctggaattagttggtaggttttaggtgtgaaaagggtataaacctggaatctgaggacaagtttcaaatagaagtagccacgtcaggtgtgaacacaaattagggaacggaatctttgagtgaaggtgctgtttggctaccttcctttcacgtgcaatttctatttggctgacccaaacacacttttttcattatcataaccctaattatatatgtagcttatatatactccctacacgactcttgtggaaaaatgatcaataataaacaacgatcgttaaagaacgcttttcatttaaacaacgacatagtcaattccataattattagttatatagagttattttttatttggattccatacacactgtcaaaatcgatcggttttacctcctctgttcctctcagacctattctcaaggacattcttgatgcgttatatatatcagaagccggaaggactacaacgatgcgttacataacaccgtaattacttcttcctttaaaaaaaaaaaaaaagagatagggattattttaaaaaaaattaaaaattataggagttatagttatatttttaaagaattaaattaaaacttattatatttgcaaaaactaagaatatattaaactcaattttttaataggccagtgcgatggttgaaaaaaatatgtatatctatgtattgagtttttaatgtgtttaaagattttgaatgatatagtatttgtttagtttcacttgggatgttttaaaattatgttcaatagcagttaacgtgatttcatgtaaatttttatatttatttaattttacttttgatgaattgattttgagtagataacttttatatgtactaagtttcactactaacttgcatttataattaaaaaaaacttaatatttttaattaaaattaatatgatttgaaattaattttactaatactcatcggccttatcatagcccaatgcccctctcattcaacgatcatattcttacgcatataaaattcatgcaaatacaaaagcacgagatgatgaacacaatttattaataccttactgcaaatcaagggattaaccttaaagacacttaacatgcgttatcatgcaagagacaccatcctaactcaataataattttagaagtaaacctaagaacatgttccagtcccaagtaaacaattatctctataaatttacaccctttatctactattgcaaatactaacttaatcgtcaaaatcattgcaagtgctccatggaaactggactagtacgaagaaaatcatatgagatttccaaaatccaccttaaatagtctttgccttgagctggggaagaacaaatatgaaactaggttgttttgtcacaagattcttttcgttgccatttcaaacgtgctatcctcttattgaatatgaataaaagcgaatgttagcttatagtcaaccttttggcttttagatagttaaagttaaagcaaattaaagcaaatttgcatagcacgatttcgaattgtaataagtatatctctatctctatttattattttaaaaaaattataaatttctaagaaactttatccaaaatataagtaaatttctaaaaatcaaaaccttgaatcattcttgcacaaacgcgaatgctggatcacgtgctgcacccatgaaatacgtgcagccactcatgactttatgtgtgcatgcaaatgttgggcgccatggctatcttaatctcccaatggcttattttcttttctagggccatttcattgttgttatatattatatggtcaattcaaatatgacttttaacttgtcgaatgttgactactatcttccctttgtttgacttctaagtcttaattaagcagcagttagctgcagactctagctaaaatattaatgtttttacttggctttcatttgacaacattgcagggttaaattttaaatgaatatcatagtattttgcccaagacttgtgtagttgtgtacctgtgttagtaattaactaatcaaaggaaaataattggtttctagtagctacctaattttccttaaatattaattaaaaatcaccgcgtgtaactgatgttgattgctcgttttacaactactgcgtcaaatgtactactctatttcaataacggccttaattaattaggacttgtaaaagcacaataggttatagttgaaattttctactttccacgtttaggtgtatcaaagttgaataatcaaagtaataaacggcgttatgttttaagcatggcatataagaaaatatgaattataaaagttaaataagtcacatctgagtgagtgtaatacatgttggactgcacaacatgtcaactactgcatatgtagcctccattgacattttttttatcaaacattaataaaaacattactacaaatctttagtaacattaaaaattatcgtcaaatcataaacaaatattattaaaatatttttcacattatatcaaaattgttaaattcttttttaacatttttagactttaacaacatgggttatacctaataacattggataaaatgtcgcaaaaatatattagtaatatttatttataatttaactatattttttaaatattgtcaaaggtttttaatattaagtgatagacaaaatattattgggaaatattacatatatactaacgcccgttgattttttatgtttgttgttgatgagctttacatttttgtttttttaaatgagacaataataaatatatagaaattgccttatagaaattgtaattagttaatattattaatttgtaaatatagttttttaggattaatttgtagtcagatacttttgtttatagatcagtaaatttacactacagtcaatctattacattcatattaatgttgattacctgttttttctttttcttttctaagcagtaatataaattatatagagtaaaaaaactactctagtccatatctaaacttttagtcagaccaaaaatagttaagagactccaaaacttacatcattgcatattaatgttagttactcttgtataaacaggacttgggagtcccaattaattcaacacaagaagattgtttcaagaataactggccgggttaaagaacccaaaaaaaaatctccattctatatattcatattaaactgaatgtactaatcaatgtgtgctgaagaatcatgttcggaaaaaagtagattttcaatacaaaaaaagaacaattttgagtcactttttacattttctcttactctatcttctcctttttgttttatcatttcttttaaattaaaagaaataaaggatgtaaaataatttttattttagtttcaaagttttcattttaaacattaagtttaaagtcaattttaaataaaaagaaaaataaaatttgaattaaaacacatgcatacaaattgcattgggaaattgcttgatataaaaataaaataaaaaaatttactggcaatgcccgttatataggacaaaaattcaatataaaatgaatgttgtaatattcttcaaagatatatacatacaaagacagagttgagtggctatctactatatagtgtaatggctatgttgcagttatcaagtgatcatcgtttgactctatatcattaagtggacccctatctttttcttaaaaatataagaccacaaaatgttttaaaaaattgtttgccgacacctactaattaaagacctcctttttttatcctttaatctttgagagatattacttaatatgtagagtgtagactcaattcctttttttattcggttgagttgaataagttcagtgagtttttttttataattcagttcagaccagaccattgaggttgaggttacacttatttcttaccctaatgggcttaattctgagccgaacttataagcccagagtattttacggtcgcctgttgtggaagacaaaaagcccacgacacgattgagtttacgtactatgggcctttggcacagtccaagaccaatgttacaacccctgtctctttttttttattagatacataacccgtctctatctcttcacaaaaaagttataaataaataagccaatccaattttagttctttttgtttatcaaaatttaaggcgagaggttaaaaaaaaccttaataaaatatacttagaaaaaaacttaaatttatcacatttcaattatataagtaaaaacttgaaaaattacgaaatcctattttactgtatttaaccatttttttcaaaattttcaaaacttaatccttagttcgttgttaaatgctaaacaaacaatagctcgatgtaaagaaaaaaaaaacgaacaatttccttgaagaaatgtatactttcctttgtgaacttccctcgttaggaaaaccaaaatgtaaaggaccaattccaattataatccaaactaaagaaaagactaaacaagaatcctaatctcatttttccttttgcccgaagaatgcatcataatctttatgtactgcaacgcatttatttcacggattattttttatttttgaaaatataagattgaaaaatattattctcatacttattatgaggtaataaaataattattatcagatatataatatatttttttaaaatacttgtgaataatatttctctgtcatattctcaagaaaaaatattttcagaattaaataaataattagtgaaacaaacgccctgtgaattgatttgtttgttagtttgaataggtaaaaaagttgcaactatacgtaagaaaatgataagaacattaacaaaaccaaggagctaatcacaccacacacaaaaaatctcgtaaaaagctgataacaacgtaataaatatattatattaagttgttttaattacatcattacttttaactccgacttttaatatactcaggtggaaaaaaaaaaatctttttaaatccaaggacacatacccaaacggaaattaagttctcatgtaacaagctacaagctacatcaagtaagaagtgtaaaacaattagtttatacggacccctgttgtataatcattgtggcttctggtataagataaaagtgcaaacctatagctataaaaatagaaataatgacactaaaaatggtattgtttccataaagtagtgacccaaacttttctttctaaaggtactaaaaagaagttccgtgtttttttttttatgtacatatacgaaaaataaaacagcagcaagaaaaaaaaggaacacaaactagataaaaggggctttttagtttgtgttaattggaagatatcaatcggaatatgcatttctaatgggatttattccctattaagaggtaaagcttttgtttgaataaactttttaataaatatttataaaaatataaatataaattgaatcaatttttataagttaaaattaacttatatattaattaaaaagtatttataaaaaataaatgaaacaacttttataaattaacttgatttattttattttaaaaaataatctttagtacatatatattaaaaaaaaatataacactaaattttatattatcaaggccagttgattcatgccttttttgataaattgtgagatattttaatttaataaaaagtaaataatttgaaatttgcacttttttactttatacatcatctctctaaaatcgtgaaaaaataatacatgaaccatatttcatgacgtgtcacccttagatgcactatttttttgcaatattctaggcgttacattccaggcaaactccaacacgaaaggtgatgggtttaatgtgattttgattgggaaatgacgtccctacccttcacactttaaaaggtggtggtaagttggggaggggcttttaagtcttttcgggattgatgccagcgtagagagataaactgataaagcatgattgttcagctccaagggtcgctttttttgcagtgatcaaatcctcatcttctctcaatcctcaaccagcaacctctctctcttctgctatcactctctcactcagtcacttggggtacgtattgttgtgttcttcattctccaattgcacgttttctctcatttctcaattcaatttctcccatttccctcttccttttaacctgtgaggaaaagggaattgtgggttctccttatttcagttcaatttttcttcttagtgttaaaaaaattacctttattattgtgtggagattgattcctgtaatttgttgaagggttgaagatgagaatttgtggagcaggtatgggttgatattggatttcctttaatttatttggtggacttatttccttcatgtttatgcacccaattctgggtcttgtgagtttggttttatttttatgtgattctgttccaattcccaatttatgaatagcaatggatgcacactgggccagctgtttgcatgagaaaatataattttatttattggcacaatctttgacccaatacggatttccatttattggaaattctatgaaattggaatcttatactatactacttgtcttctttttcttcccccaagtgagtgctaatagttaaaccataaatcacttctatatttcataacaaggatttgtttttctctatttctgtctgattgcatacatgcatgaaagaaagagtatcggctaattgttttatttgaataaaaaatagtggcgtgtttaagtgttaaattagtgttcaatagtaggcacagttgtatgtgagtctgcagcttgtaaagttgtagtccatgtttgggggagaaaacacatatactataagaaaaaatatccaaaagttagagggaggaatatatgtgattaggactagaacataaagtgatgtgatgggatgggagtttaagttatttttaaacctaattatctttataaaatttaggacgtgtttggtttcagaaaatatatgtattcaatttttattttcataaataaatataaaaatcttatcttacatttactttgtttactattttccatgttctacaaattattttggttggtcctagcacaaatccttgacaatagggaacaaagtaagcataagatgatatttttgtaattatatgtgagaattcaaaatgaaaacagagaataattattttattagttcagatgatccttgattcatgtaaaacttttatcattaccatttaccaatatacaagtgccatgtggtatagtaataaatgtagcaccatatggatgagtgattcaaaattaatttttaaacttccgattatctgttcaaatttgtaacttcagttgtcttggcatcctgatttggtggctcttttgttttttttcatatatacaagagcattttgaagttgattatttcatttagaaaaggactctcatgttactcaaatgcttagcagcaatcagcagcagctacaccaccacgtccaatttgcttttagtgtttgcttcctcttccctctccagtcctgccaaaaccaagttcctgccctcactttctagattttctgtcaagcgtccgtgcttcctttcccaaactcgtcctcacattgccgtgaacaagccctccatgaacctgttgaacagactcgggtttggcagcgcaagagcaccagagaacatggattcatccattcctcagggtccagatgatgacataccagcaccaggccagcagtttgctgagtttggtgctggctgtttttggggtgttgagttggctttccagagggtgcctggtgtgaccaagacagaggttggttacacccaggggcttgtgcataatccaacctatgaggatgtgtgtacagggaccacaaaccactccgaggttgtaaggattcaatatgatccaaaaagttgtagctatgagactctgcttgacttgttctgggctagacatgatcccaccacactgaatagacaggtatatatgaagttttttattttttttattttttatttttttatttttcacggtatcatgtaaaaaatgaggaagtctggtttctaattgatatttctagattttgctgatatgaataataggtctggactttgtgtattgtcagcataaatgatttttgttacttttggggtttctgtacaattatttaatgatgcattacttctagagttaaacattttgccaacacttttttgattccttgattgatttatttatagtaaattagtaattttggttttctctatgtagccattatttaacagatacatttatggtttgatatctagtcatgtctgttttgtaaattctgttttaatatgatattgtgttgaattttgggtcgcatcaaattgcaggggtctcttggtaatagttgtttaggttgtttttacccttctgtttgcacttggtgggatgtttataggggtgtaacgtaatagatggttaggataaattaagttggattaaaatagatggttcaaaaataaaccattagttcatttatgatgtggtagaattttattaaaaaaaaatccaaaccatccatgactttatatgataaagaaaaatcccaacccatccattaataatgtttcatgggtaagatatccaatccatccatttatttattttttcctcttgtcagcaaaaactctcttattaaaacatctcttcttatgagcactgttttcaaaagaacctgcaatgaaccccagctcctatgattatcattgatccaatatcttaacatccgatggattgtctcctttctttgtacattctgtaactccatttatcagttgcatttaggagttaatgcaatgatgattttgctttaatttcagtgtggcaatgtactagttccaacttcttatgttggacttcaattatacatggctctctagaatgacttgtgagcatccaaaaataagtttccatatggagtaatctatttcagtatttcctttgctacatttttgtcttgtcccttgtttcttttgttctcccctttcaatatgcattcttaataattttgtttcttgaattcactcttccatccaaatccatgcacacacgaacttttgaaaatatggtgactagttatgatatgcagcagcacatacatggattgtacattctaccgcttaagcgcttagttaccatttgatcttgttgtgtggcaggggaatgatgtgggaacacagtacagatctggaatatactactacacgccggaacaagagaaggcggccaaggagtcattggagcaacaggagaagcagttgaacaggaagattgttactgagatccttcctgccaagaagttctacagggcagaggagtaccatcagcagtaccttgagaaaggtggccgatttggtttcaagcaatctgcttctaaaggctgcaatgatccaattcggtgctatggttaattgccataagtgaattgccttcaaagatcaatgcaaccggttcttcagatattgaaagtccatagttttgttagtaagtatttgtaaatatatcaacaaagcttgtgcacactgtatttgaggttgaagatggatatagccatagagttgtatattgtcttttatatataatatggctttgctttgaaatattatctccacgacctttagttagtgttccgttggtgagaaatagaagggggaatggaagataagtattattataattttttatttgtttgatccaaaattttggagaaggtagttgaaattgttcactcaaaattggagagatttgaaggactggacaacttttacattaggtagactaaattatcttttaacttaattttatttgaccatgttaaataattttctcctcattcttatgaactatatatcaggtgtatttcttttctgtcataatctctcttctgtcagtttctttcaaaatcttttcttttgaaagaaactgatagcattgtctatttcattacgttcccttatataaatttatttcttgattagtaacacgacatttttttgtttttgaagtggggttggggggttaacaactgaacgtatccttttagttagagattaatttcttcaagttatagaaattactaatgtataatttgtttctttcaacgaagtagttttagttttttattgtctcgttttttttttctttctttgaaacattagaacgtgatcttatgaaaaaggcaaacttcattgtggtgggaggttagggaatttggtggttaaagtaggatagaataaaataactatcatatttaattgtaattaattgtttgatgtattggccggatatggttatgttatctttttgtttaatctatcctgttaatttagcgtaatttttatcttttgaaagaaactgagttagaaaataacatgacatcataatacgtgtatctagtataaaaaataatatataatatataaaaatactatatataaaatatattattaggtataatatatatatatatatatatatatatacacataaaccttaacataaagtaaagtatattgtaaaaggtaaaaaaaaatattataatttttaaaaaatacaattttaatataaaaaaatctataattataaatatttacatgatgtgtaagatgtttgttagttaattattattttcatatctgtatatactcttgaaaattttgtttatctctttttaagatctcttttaaattgtctttgcattatttttttatcaaattaattttaattattttacaatttttgtacttaattaacaataaatggtacaaagtaataagaaaaaaatatttttttctcttgcgagaattggaaaatatgactaaagatgttaataattaaataggaattaagtgaaaagaataaaagattatgcattttggtaattttaagagtaattttaaaaaaataatacaaactattaacaaatttaacatgactaattaaatttctaatttatctaattattgtgaattaattaaagaatattatattaggtacaaaagtagtagttaattacttaaattgttttaaaagttggaaacgggtaattgttagtggtataaagaattaaaaggtgggaaacaaaacaaaaggaataaacactacaagaattccggctattacctaaaacccactgtaaatcaaaattaaattaccaacgacttacggtaggctacttatccctctactataatcttgttgatattttgtttatcgacgatcatgaaaaaccctaggtacgtaatatagtggactaaggctaagctcattgtaattcgaggaaaatacaatgtgttcttaatttggtcagtaatttaaccttcgataatagcaaaaaggaaaagaagttagtaattttagtaaaaaatacattcgcagctagctaattgttaatgcttaatggtggtttagagcagactaactttggtgaatcataagtttttctttgctggataaggtgggaaacaaaacattaaccattactaaagattaagattaagagtatgtttggaaatctgaatgttccaccacatcttagacattactaattatatttactagtactgtattatatgcataagttttatcagattattttcaagagtaaaacgtggtgaaaaaaaccgaaaaagctgtgtaaaagataatttgttaattgcaacgtggccttttctggtcggaatttgatcatatacaatattcatattcatttgtgtaattttgactgtatatattaaaatattttattgaagataaataaatattcatattcattttttttgctgaacaaaattataactatcggtaattatcatttcttttagaattatattattcatataaacaacttttaaaataatttctataatattttttttctttctcattcatttttaccatatgctgaaaaaaatagtataactatgtagtattttcttaattatataaatataatctatctttctaacgaaaagaatatttcatcattgcacgtgagtcctgacacgtacatagtctattattttatcaatgctgattatggacatgaagtccccactgaacgtgggctcttgttatttccaattttccatgcatgtagacaatatatgtacatcgtgatcctgcatcaactggtatttttcacattatatattttcatgatactataatataataatcgaaaaaaatgtctatattgttcgataaaattaaagcaacaataacctaaaagtttatatagcaaagcacttgaacgattttatgtttacatcaattaattttattgttcaaaacaactactcaggttacgtaaaaaaaaaaaactattaatgttaattaaagataaagagaatactttttttgagagtaagataaagagaatacttaattaataagtttatgagtgtgtgataaacatcaaagaatattacccatgatgaggggaaacaaaaagatcttaacctgtcttatttcattcacatatttatacaaataaatgaaaaataataacggaaataaaaataaatagtccatttttataaatatttaaaatatcttcttaagatcacatctttagcgaagaaaaataatcttctatcaaaggggaaaaaaattcattaaaggaatattactcttaatttcatatatttattgaaacgaatcaaactaaatcaaacaacaaaataaacatttagaaaataatagcattcatagtaagtaataaatatatgcattttaaaatctattcaacaaacattttctttctgaggaagtccaaccttgctcataatttagaacaaaaatttaaattacacatgctccaaatagaaaagtaaaaaataaaatggtaaagaatcaggtataaattaaatttggacccatgatggtaatgccccacaagagcgacgagccaagtagaacctcacacattctgtgaatgtatcctttttctttcagtttctgcccatgtatttggttggcacttcggctttgcatgcattgacaatgtaaaaattggaacacatatctcgttctaccttcgaaaaaatttataagaatttatatccaattggttgtacgtattttcttaatttacttagcattacttgaattaaagagaaaaaaagaaacctaacaatggcaatgaaaatgaaaatcaagttaggatgcgcagccattaaccatttttccagttgtttaatttaagatttttaattttaataagctatccagatctaattctgcattgaagtcgtaccaaacaaagaaaaaaataaagttatcacttattatgccactttatagagggttggctcattaaaataaatagtattaatcaatttcgaagcccatgtgagagcgtatttttttaatatggagcattggagcgcacgttttgtatttatcgacgtgacagtctctttggttgccacgtggagtctccctcggatgcctttttgtgtagggcgaaacagagtagatagtgaagtgtgcaagcaacaaatagatcagacactgacgacacttgctttactatgaagtgccctacacgaccgactcctcgcgcgtgatcaattttcaaataaacattatgcattttattgaagctgagtctcacatatccaagtgtcatgaaaatcggttggattattgaatcagtcgaggtaagttgaggtagtggataagtgatttagtggtccaaccgatgaatcattaattgaatcgatttaaattggtatatattaaaaatttaaaattatatatgtatttattatatataaatatataactaatattatttgagtaaaaaaagttcattcatactctaaaatctaaaataactattgataataatccaaaatttttaaaaaaatccaaaaaaacacatataaaaaaatcacataaaaaaatcgaacgaacttgatccgaccaattgagtttgaccaaatcaactgtatgatcaatttaatgacagtaccgaaccatttctcgattcaaccgatcggaccagtcgatccgatcagatttcaataacactacacacaacaataaaattgttttgattttgaatttgaaaataactttttacatataaaaaataaaattacttataaaattcctctctttgcataaagaaaaattcaaaaacaatctcttttaacaaaagtaaaactgcttacaaaatttatcttccttatctttgcataaagaagaatcttttgaacatctaaatttttttagttatatgcatttggttcgagggcgatgtctaacgttggagacctaaaccgtgggaaagaattactgtccattagatctatatgctttttagatatgtttgggattatcataggtttacacacattagaacaattttcctccaatctcaaccatcttcaaggaccacgtcgacaagattttcatcgtcaacaacgccaccagtgttgtcgacgacatcgtactccaacaaatcgcttggaacttttgtgaaggaaggtacaaaaaggtgtcgtcatccgcgctctactacacctttggttccagttaattccaacaatgagatctaaatgggagattaatccttctaagtttacgccttttgattgcgtgcactgatcttcgacctggcgtcgatgacgcatgctagttgtcgcggatctggggttggcctatccatgaaagagtctcaaatttcgcttcaaatttgggggttttcatgaatgaaagcgtttgtgttttttgtacgattgtttttttgctttggattagtgtttgaggtttggttcatatttagatttcacttcggatctgcgctcagtggttggagaaggagagcgtaagaaaagaaaggaaatgaaaaactgaaagtaggaaaaaaaatgatgctgtgagaaatcatctccaacgacgactaatagaggtcgacgatgatgctaatgaagaagaagagtcattatgtaaaaaaaaaaatagtaaaagaaaataaaaattctaatatatgcatgtctatcatatatctcaaaatcacttaaatccaatgaccacggttacttacgcacagtgggaaatctaccttactttcccactgtagacgccgggcatggaaaattgtacccttttcttttctggatgcttgaacaattattatcactgatctcttatctctactttctgaatttgacttgcactaagactttatcaatactatctgaaacgaataaaataaacataatattttttttaattcattactatgtatatctcccctagtttatataagaaataagtaaataaacattgtatactttttatatcaattatgagaaatgtaaatatcttttctaatatattaaatgttaatttttaaagccttttattttataataaagtttgttcacaaatatgagtttaactcatattataaaattattttatattatcaatcaattaaaaattatcattaatataattttaaaaaattataataaaattcaataaacttattatatataataatttataattaaataataatataaaaatactttacaatttcaatgcataacttaattattttcttttacaagatactggtgaatgtgatttgatttaaatataaatttgattagaaattttgatttgtaataatctttttcattttaaaattaacacattcaccagtgaaaaaatatttttaaattatgaataatatcattaaatatagtcacatcttaattaaaccattaattttgtgaatatttttaaataaaatttaaatttatgtcactaataattaatatgaaccaattagattgtttttaatgcagtgtgtatttgtttcttacgtgaaaaacaagaaatagtatttatgttagtttttctataaagtcttctctgttagctttaacaaaacagcatatgttacactttaagtgtttacgtgaaacacgacacatttgtatgaactgttttaaagagtctagttagagttagatgtaaaaagtggtaaaccctttacgtatattatcttctttgttttttgacgaaatcaattttatcttaacatttaacatttgttgtcataaactcagtttgtgaatttgacacctattgtggtattattttaaaattttgacagaattaaaaaatagtctgtgaagtttatatttcatcatttatagtaagtcagatattagtccattatattgtcttcaatggagtatcaaattgacaccttaagtgcctttcaacacacggaataaccttcatatcttagttaatatgatccaagttttgtgctctcatatttgtcgcacttttaccctatccgacttatattatgtggctactatatatacttttaagggttgaaaaagctttggaactcaatagatttctctaactaaagtgacaatgttcacgcctcaccagtttatcatttttcattcgtgaatgaattattctttgacaaaaattcttaataacttatagaaatagataaaattatggagttgtgtattttttttaacagcagaaaatttattaaaccaagctaagcacaagatgtgccaaagctataaaccaccagagtacaaagacagcttttgccacacatatacattattaatcaatcataaataattttaaatataaatatatattttacaaaaaaattgtacttttagtttcttttattttataggcgacgataccatagtgttatatttcaattttcagacttgcagggaaaaatgaaaaaaatcaacaggattttttctttcaaatttggatttctaatagtttttgtttctaatttcattgattcctgttagatgtttttattttctgatttggccaatggccaaaactgacgatgacataaatgtttgattgcttcattaattatatactcattgtctacgagaataacagtaaatcgaatctctatgatatgaaataaatataaataaatgaacaaatccacctcttttttaagtaatacgaacttgtaattttaaactttttttagaggttgtaattttaaaccttatcatttttttgcaatgtttggattatttcaaagtaaataatatacattccaatttgactaaatgagcaataagtaaaattgggtttagtttttttttaacttttttctttgattcacaacgttgaatcacttttcatcatcattttattcaattaggttaatttaaaatttaaattaaatatttctaatgaaaatttaagtatcatttcgtattcaaattttaccaatctaagtctatattttattttataactaatatttgaattagtacctgcattgtataaaataaatatttattttatataacaaaaatttacagtgaataaatacttcaaatttataaaaattattttaaaataaatattcttaatataaaaattatattttaaatttatgataaataatttatagtgataaaatattattttaaattaataataatttcttttacaaaaaatattaaaattcaaattataactaaaaatattaaaaaaaagtcaaattaaccacataaatggtaaaatcaagtttttattgagtgattaatttagatactgtatttttgtcatccgtatcaatagaaaatgtcaggagaatttacaattactcccttgacatttactcatttagatattatatatctgattttctatattatgtaaacaaatattattttctctatattatattaacaatatcttaaatgaaattatctgttaacaaatattaatttagttgataaaaaacaattaaaaaatatcctaattcacacaaaaaaattaataaggaacaattaaaagggtgtgaactctaaaatcttgtaattatgtttgaaagtaataaacaataaaagataaaaatgaataaaattgatttgaaatgtaaattgatccaatttttaaaataattatatttcattatttaaataaaataaatctttcttgaactcatcttaaatatcttttttcacatataaattaattaatattttaaagtcattatccttgaaataaatcctaataaataaaatgtaaaagtaaaagaaaccccccaccatccttcgatcattcaaatcagaacgtctcttccaccagcagcctaacaaacatcgtagcttataaaccaagtagggccaaacgacatcgtataacattttcccgcgcgtggaatcatgataactgatagcagatacgttgaccgtataaacatacggaaagacgtacacctctttgcgtatgtgtatttgtattgtcactgtgttcgtccttttctcagcaaaatctctgaaacagtgaaactctccctctctcttctgtactttcctcgtgtcctctctctcacacacacacttcacgaactccatcactccaacgacacacagattctatctcctctctctctctcacacacacacacacacacactctctgtttccattttatctctttgggccattcattctcgcaagtaactcttgtttgtttgattaaatggctgagactcgccggcgacgatgatgttttccggcaaggggagttttccggcgggcattgcttcgaggagcgtgaacaacccttcgccggactcagatcttgaaccggcgaagccatttctgcgacggaacccgagaactccggggacacggttgaggagacacggtggcaaacggagcagacccgaaacccctcttttgaagtggaagatccattacgatccactcgaagacgaccagaagtcttccgtcgctgggtcccgccggagaacgtgccggagcgccaagaagcaagccgaagtcgccgtgtcggcgaggagactagccgccggactgtggcggttgcatctgccggagacggccacgggtgatggccggaaggggttggaacataaggtaggttggaacataacttgggctactcttcttacactctgggtctggacctaactcagtcgcaaaacctagtttttgctgcgagggttttgctctgcttatatacactgttttgcctatgacactggtcaatgtgggatctcaaacgtttacccttttgtttttttctttctttctgttgtttgagatccctagtttttcttcgttcccgtgtgagtgttgttgcatcttgcatgtgtttgttgtttttgatttaaatgtgattttgcagctacatgctactatgttacttcatctactgtattgtaggccacccctcatggagaaaaaagaattaatagtttattgttggggtttatttattttcatatgatgattttgttgttgcttgattttgaatcgtgggtcttcagattctatccttggttccttgtcattattgttcactttcctgttttggtgttagagttaggggttagccgattaggctttctatgaaattaaaaatagctgtcttttgaagatacaaatgcttttgtttttttagttttctcgcgagtgatgtagttctagtggaggactaattatagtctttgtaatgattggagaaatgagttgagttgggtttgtgtttgtaaataattatcgttatgttgaagatttcttccctaaacgcaaacttgtgttcggagaaaggaagaatcagttgcttccgttcgtgctgcattaaatcatatccatccagagtgcattgaatattgcgtcttgtttggcaaaatgtcaaacaaacatgctgtgtaataatattggcttgtatgaacttatattcttttgtcagttttgtgctttttgagagtaagttgggactttagttgagtcttccttttatatgagattctgttatttgttatctgtacattccagttgaattagagaatgattatcttccatgcactttattattgtcttcgtttgtagatcaatgtagctggtttacaatattaatttcataggtttccatttctcattactgatcactgatgacacttatctgcagaatggaattggtcacgcagggctccagtttctcagtcatcctaatggcatgacccatggttctgatctgaagaagaatccatctcaaagtccccgttccatatttgggacaaagaatggacacttctgtgaggtatgatttttcttactacttcaatatcaatataatataaccattaggagttttacagctctttggtattgtaattgaagattattgactgaatgtcatatacacataataactcaagttaaaactgcaacctgtactgcacaatgatcccaatatcccattgctcggtcatgcaattacctgttttaatcatctttgtgaaaatgacatcaatcatctaattattaagttatagatagtgacaaactataatcatagcaacgtgttgtttatgatttcatattgtggaaatttttagtaatatttcaaaggcctgcccatgcaaacacatgcatattatgggttgataccacccaatttgcactttgaaacaaattatgctcattgttgtattgacccatgctatgtataacagtatagagatggcttagataaaacatttttcatgtaaacctacatggtgaaattagcttttccaatgtctatatgagcaaaagagttttaaaaagtgttctgcttctacactaaaagtgaaagagcagacaattaaagtgctaattttaaacctactttatgctattcagcctgaacgtttccagcttcccaacaatgaaatggagggtgcaacaaaatggaatcctttatgttcaaaaacatcagaggaagcgcagcatatctacagccacatgaaacatcttgaccaaaaggcaagtgctgtatctgttgtatctgctctcggagctgaactagagcaggcacaaacacgaattcaggaacttgagactgaacaccgctcctccaaaaagaagcttgagcattttctgaagaaagtcagtgaggaaagggcccaatggagaagcaaagagcatgagaaaatccgcgcatacattgatgacattaaagcagagttgaatcgagaaaggaaaaatcgccagaggattgaaattgtcaattcgaggttggttaatgagttggcagatgtcaaactctctgcaaagcgctacatgcaggattatgagaaggaaaggaaggccagagaattgatcgaggaagtgtgtgatgagcttgccaaggaaattggagaagacaaggctgaagttgaagcattgaagagggaatctatgaaactaagggaagaagtggaagaggagagcaagatgttacagatggcagaagtatggcgtgaagaacgagttcaaatgaagttgatagatgctaaagttgctcttgaagagaagtatgcacagatgaatagactcgttgcagatttggaaagctatatcaggtcaaaaagcacagagccgaacacaatggacatgaaagaggcacagtcacttcaacaggctgccgctgcaatgaacattctagacattaagggattttcatatgaaccccctaactctgatgacatttttgccatttttgaagatgcaaattttggtgaagtaaatgagagggagattgaaccatgtgtttctcacagtcctgctagtcatgcctcgaatattgacatggtgagtcctgaagccaatgcaataagtaaaggtggcattcagaggcgttctgatgtatttatggatgataatggggatatagaaggagatgaaagtggatgggagactgtgagccatgtcgaggatcaaggctcaagttattcaccagaagggagtagccgatctttgaacaggaatcaccgagagagtaacgtctcagggagaagtgtacttgaatgggaagaaactgcaggtgaggagacaccaataactgaaataagtgaagtgtgctctataccaactaagcaagcaaaaaaggtatcatccataacgaagctttggaggtcaacatactcaaacaatggggacaattacaagataatctctttggagggaatgaatgggagactttcaaatggaatgttatctaatggtgtcatcatgtctcccgatcatggatcaggtaaaggtgggctgagtccccaagaccttctataccagttgagtcccgagtcaggaagtccacatgcacatcaaggcatgaagggatgcattcctcgcactgcacagaagaatagtttgaaagccagacttatggaggccagaatggaaagccagaaggttcagttgcgccatgttcttaaacagaagatttagttttgggcataggcattgcacagattgccaacctgtaaaattgataaatgattgatgaaaagcagttcattttagattgtgagggtacaaatatgctgctttatggaaaaatctgctcacagtgatgaggggtcatgaatagatgcacattttctgcctcattctagtttttatttcagttcttcattatcattcatattaagctttaaaagcagataatcttctcattcccttgtgctaaattcctcaaaacctgggatatcttgggaaatagctcgctttgtcatctgtgattacaggccctgcttcattgggtagggtcttgagaaaattatgagaagcatgtagcatgtgttgtactttatcatgttcagaggacaaatgtgatgggaaaaaagatcgtcatataatatagatgatagcattatctactcaagattttgattttctatcattgtgtatgtcgcttaggatttgttgtagattgtattttaggaggtggcaaggatgatttgtggtaccgggacaaaaaaatataacttaatacttactctgggaccttttcctctttctgtttgtctcctttattgttcattttgatagttaatgttgtcaaagtataaaaaaaaaaaaaaaaaacaatgaaattgaaattagcatttttcctttgtttgctgattataattaagtcgaggtgataattaacgtaaggaatgttttaattttatgatgttacacgagaaggaaagctttctacctttagaagttttaattatgatgtgttcaattttagaggaaaataataaaaataatttttggatataaaagttttttgtgaatgttaatttgtgaataaatcagaatgattctttttcactttaataggtgcgaatgaattttttatataataattaattataaagttattaaattttatcatggtaattaaatacatgtattctcatgtttatcttccatagaagacaatgctacttgaatcttatgcaggataatttgaatttgaacgttcatttttttttacaattaaatttgtttaatcattggttttttaaaagaatatattttagaggaaaaaaagaagatttaattgcattcttaaagaatgtattgaattatgattttaaaagattatgtaaaaatgttataacttaagatatttaattagtttttttggtatcataattgtgtagtttggtcgtttaaattttaattgtgttaatttaatcacttaaattttcttcaaattataatcatatccttccattttgattttattaaatgtttattgaaattaattgctataacaaattaatatttaaatacattataccatctgaaaaacataaaaatgtggtgacctacaaagatagtttgactgttattgacttaattttttattatgtttgtggttatttttataattataataacaataaaaataatgccttttatcctgaataaattaataagctaaatattaaataaaatctgaagaaaaaaattccttttatcacgttcacaacatttttccagcaaaagcaataaaatcagaataaaaaagaactttattgtaaatgaaaaagaaacttacagaataaaaaaatgaaacttacagttgattcaacaaagtcagtgagttatgtaaatcttgattctgtcatataaaaaaagaagacagaaaaaaagagttgaagacggttcagtcgcgcacccgcgaatcagaaatttcaattccctccatttcccccccaaattcaaatcccccaaaccctcccttatatacattacatacacacatctcaattcaatttccatggcgaatttcgaagtgccctcattttccctaggtctcgacgatacgcccccccattccccaatccatccacctctttctcccgatcttcatgtctctgactccgactccgatcccgaatcccgacccgacccgccgcgccccctcctcaaacgcctccgtcgcgggcccccgccgccgtatctcgaccccgatgccgatgcctacgccgacgacgacatcgaggagttctcctctcaagaagatcccgatcaaggtcaggttagctaacacttcaaatatttcacctctctctcggctttttaattttaaataataatattaataatttccttattatttatctgttgtaatattattagggcatgcggttccatcggcatggaatcggaatcattctgtgtgtagcagctcgaaagtttcgttgaatggaagtggggttttgacccctcattcgtgtagcaactctttcagggataggaaaagaaaggtactttccaatgatgttccggcttctgccaggttagagacagggaagagtggcttgatgtttcccaagttaaccactagtcctctccgaaggtttcaattgattgattcggacaccgatgatgctgatgttggtgttggtgctggtgatgccaataaagttaaccctaacagtcatttggaacaagagaagaaaacatctgctgacgagaacaaaaatgaggatctgtggaagaatttttcgccggtgaagaatgtttctgttaataggtttcaattgctttcagattctgatgactcggatgttgatgtcggtggtgccaataaagttaacactaacagtcgtttgcaacaagataataaaccttcggttgatgtgaatggaaatgaggatctgtggaaggaatttttgccggtgaagaatgtttctgtttgtaaatttcagttgctttcagattctgatgattcagatgttgatgttgatattgctggtgccaataaagctaaccctaaccgccatttagaacaaaataagaaaacatcgcctgctgatgatctatggaaggattttttgccggtgaagaatgtttctgtcccgacgcctgccttcaatgagatatgtgaagagtactttcgttctgccaattgcaaggaagtgggtggtgattcgtctaaaagttttaatgagaggaatcctggggttagttctagctgccagagggatcaacaacgatgtgaatcaacagaccctgttcatcccgctcatacttattttttccatgaggatccgagaattcggcagttagtccgcagtcgcctgcggaattttaatccactaggtaccatcaacacagtgaatcagcaacctaatttctcacacattgattacatgtaagtcgtaacccatgttcatttgttgttttaatcttatggtaatgatttaaaaagaaagtgattgtcattttgtattacatattgttttggtgtattttgatttcaggggacaatttggtaatggaggagcttcaaacatgcagggagttcaaaatggttttattaatagctcaacaagggggaaaaacaaatcaagtaatttgaatgttgagggatcttttgatgcttctggaggctgggtggatcccaaaattgtttctccattcagccatggagaatcttctagaaagaaagcaacaaagaggaatggcactaaaaatagtgtctcaaaaagtaatagtaaagcaaacaaatcaaaccctgcgaaccaatcatgtgcttctgggggctgggtggaacccaggagctgcaccagtttgccaaaggatgcaggcaaaaggcgtgttcaagcaagtggtgaatctgctggtcattggtttacatcaccagaaggaagaaaagtatgagaaaaagtctttatttttttttaatgttattaagtattaactggttaaatttatttacttttctcatgttagatgctggtcataagaagttatgcgagctgttttgctgttgtttaaaactgaaatgcaaaaaacccatacagtatgttacttaagatttaaataagtgcaatgaaattcaaattatcacattacataatgcctcttttttttggaaatattgttctatgatttgatgcacacgatcccatcattccaatataactatgtaacactagatagtgatactcaatctcccattgtttttgtaaacattcttttgacattaagattaattgttatatagggaccaattcctacttgatgtttaatggcagggaccaattcctagtggttttgaaattataggaccagaaccataattgagaaaagcttttaagtctattttgtcatattgtataaatctatcagaacctgattctttatccccccttgcaggtttatgtcaacaaaagtggggaggagttgacaggccgcaatgcttatagacaatatcggaaggtacatatacttgcataccattctgatgttttgttgtccttttggttgtgatgtagcactgaatgcctttgatgtttacaggagagtggagcaggattcaagaaatcaagaaagaaaaaaggtaccaagacgacaaatgccaagaagagaaactgaacacttgatggcaagaaatttattatccgcctggtccacatcccataatttacttgtggatcttatgactagcaataccctataggttcaatgctgttaaattgccctaaacttccggtatcatgtgttggatgcggacaaggaagccagccatccagcatgcagcatcgcacgaggaaactgaattggggtcttgttgcttagtgaagatttgattctaaaaaatcctggcaagtagatattgtgagcttatgcaagtagttctgtacagtgcacaaggacctaatgtctttggccatcatgaaattgtaactttagataatgtttcactttttttattaggattcccaataatgcttcgattccatcttgattcaccacttggttctgtgttattatgatagcttgttgctatgtcaattatgcataatttacttctggtgtttgtagattaaagtaatggaacgatagaaatgatagcaaattttaagtaaatgaagacatcaagaagaccttttattccgtctatcttgagcggaggatagagatgcttcgcctgaattgtttgggctatttttgttgcttatgctgtttattggcttcatttgttgatgtttaatgcacatgtaccaaataaatactgaagtttacagacgatgtaaacttaaattaggacataatatttgtgagcggaaacttaaattaggacatacgtgagattagcatacgtgtacagattcaaaaattaggaattttcactagaaaaatagaaaaggaatttaattttccaaaatccttgtaaccttttaatttttttaataaaaaggataacaaaattgcttttgttaatagcgaataaagataaagccataaaggtggtcagtttcgcagaagcgtccaatcttcacgattttatttcatccaaaatgatagattgaatacaatttggaattaaattgaaaacttgttgacgagcataaaatctagcaacccttgacaaaaaataaactacttgattggttgtctacgtactaacttattggatggctttagtagaacgtggggccaaaaatgaaatatatatatatatatatatatatatatatatatatatatatatatatatatataaagcagattgaaccggtaattaccaatgatttcactgtatttgaagttatctctttcaactccccggacggggaaaagtgttaaaaaaaagttcacgtttatcagaagctattaaaaatttaggccttcagttcattcatcgtcttcattgatgattagaagtattctgcttgtcttcacccttttcttttggaagtggagaacccttggatttcaatatctgttggcatactctgaaaatccatcaaaatagaacattcattagtttttgagataaaatcaatgtatataatgacaatcgagttaaattggagcaaatgaacaatgctttgcttcagaaaggggtataattctgacccaaatgaatgatcatagtaccctacaattatgcatctctgaaaaggaaaacagaaagttaaaatcatacgagtttaaatcttctgtcttgctcttgatatcacttgacaataatactggatcaaagttcttagggtaaagatcttgctgttgcctcgtctctcttaaccactgctctgctttattgcactcattgatgatctgaaaaagaaagttgtcacttaaaaactgatactaagggaaacatcccacaattatacttattcactagtttattgtcgtacctgttctttatcttggggtggaagagaatctacagacattcgatactctacaatgcaacttaacaaatctcttgtagcttgtggtcttgcttctgtgtctttataccgaaactcaattggatctaccagctgcagaagatggagattataagcaagaagtatggcggatgaaacatggagattggagaaacaaaagtaacctgttttagatcttctagttttgcagaataaacatctacagtttcgtcatcaccatcatcataaagccaatcctcagtcgctttcaggctcctagatatgtccttcctctcatgttcgcttgaaaagcttagatatgtgctgaatagctattcatacatgcaaataaatttaaataccagtacagaatgaaaagtagagcatacacatgaatacagctttaataaaatcaacggtaagaaaaggcataaggattcagattttaattctatatcggtatatcctatgcagatgttattacaaagtataacagcagaccatccccagcttcacaaagttttacccttacatttacttgagtcatgacagaagtcattaaactatatacaacagctttttctcattttgatatattcaatactttcatatttacatggcaaaatttaaggctctagtttttgaagaaggaacacctcacagtaaagatatgaaaaagaagaaaaaaaggatcatacaatgaacaattatctattttagcagaagaaatatgtgaccgcttatacaatgtaattgaatcagagaagccagtcatgtctacatctcattaagatattgaatatgtaccttactcctcgtttcataaatataagactccaacgaattcttcttgtctttggtcagctcaattattctgtcctgatcggcgaactggagttctttttcttgagcttccaatatctcagccttggtcattctaccataaattttttcactcacaggtacatgaagccttctgttggctttacctttttttgtaccatcagcctgtaacaaggcatgatagtaacacttttattttcccaaaacaccaacatgaatcatatctgcaatcaaaacaatctccacaagataaaaatgtacatatacaacatcacagacattataaaaaacggttgcgacagactgacagtgaaagacatggtacagattcagtatcagaaataatcagataattaaaatttagccatataattgttcgtgttaaaaggacaatttgctagaaatctctaatatctgagatatcttccagtaaaaaaaggtgagcaggggagagagagagagaacaacatgggagtacttactgaatgatgtggagcttcacactttttattgatacaatcttctgggacattttcaactgtctcagaaacaggttcaacattcattgcttcagaatttgaatgataatcacctgttgtaactgaatcattcacatgatcctcgatcaactgaaagacaaaaatgtccatgtgcatagaaagatctctcagaaaactaataatgcgatatgaagagataaaattgaggtttcttactgtagctgattcaatactgataatgccatgcaaatttagttgaactcgaactttaattctcgccttacttccatgggatccaaggaaaggatcaatctgaatagaaatgacaaacaaatgcataagcatacaaaaacaaggtgtaggcataagcatacataacactttttaatcactggcacaaggaatggcagtatctcacaaccaattattataacttcattgtcctgtaatattgagatgtcttataatatagaatagacattagcaaatgttagccaattgtcattgaagatactaaatattaaatacagtcatttctctccatttgagaaacttagacagtagatatatggatggtgttagatccaccatatctgcttctcctaacattatgatttgttcaagcatgtgcacacctacagattctcatattgctatacctaacacttttacagcaatgacttcctttgagatcagaacaagcgatggtcagcaaggccatttaataatgaagtctttcgctccttcaagaaagggggaggtgtctattgcattgtcccaagattcaacaacaatagccttttacaaggtggggttggctacatggatcaaaaacaccataatgtcttatcataaataatgtctaaacaaaccatttaaatcttaatctttcttaatgatttaacttatagtttttcttcgtctcttactacctctaattattgaactatcttccatctaattcactctctttatttagagcttctacaagtcttcacatgtgtctaaaccacttaaggcacgattctaccatattttctacaacaaatggtgcctaactttctaaggaatcattcctaattctaccttgtgtgtctacttatccatcataacattcttgagttggcaatattgagctttattccttgttgagtttttaccactcaacattgaacttcaaacaacattgcaggtcttggatttgactcctctaaagtgagggaatgcattctaaagaataaagtgcatttataaccattgaataaaaaatccacggttgaaactatgataaaatacaagcacatgtataacaagtaatagctttatacataattgagtcctagacttacaattcaagagtaaaagctgcaattatgatgatgattactatatagtatatactatttttttttgtagaattaaacataccaaaacagtaaaatgaagaagatgaataagctcatagagactataccacatgcctttcatgaagcaccccaaagaagcaagaatagagagggtaataattaataaaaaattaataacaaagaatcacggacaagatgatctaaactccttcacatcatagtaaagttctaaagcaggcatactgtgaagcaactgattttcggagatgtcccaggtggtaattcatctggattagcatagaatgcttccagacggagcaaattactgcactgaaatgttagaattttaacacttggaatgggttggccttttgggaagagtacaccatccaatccttcacaaattggacttccatcacatgaaagtccaatggaaaaaggaatagaatcctggatctgaacaaacacaggaaattacattaattttatagagagtaatacatgctaatgcaaaattctataaaaaaaaaaacacatgattaatgatatctatgaagttagatatatttcaattaagatagacaaattaaatgcagaaaataaacctagcacctatgtaacaactttgttcatttagtaattattacatttctaacctaagaatctacaaacacaaaaatctactctcctatatatacatatcatatagataggataagaatcaatgtgtttttttcaatattcaaacctcatattctttgacatggaaaataggactgagcattgcacactggagagcacaaccacgtgctacacactcacttgcattcagcgtgcggctcagttctctcttaaatagagaagttaataaattagttatagctggaatccgtgaacctgaaccaactaactcaacagaattaatcttttctactgtcatgccggcatcagccaatgctttgtagcagggaatattaaatttctccaataatcctgatgccaaattctcaaattcttccctcttgataaagcccttaacatctttttcatccatcaaacactcaatgctcagatcagccactgcatttgcactcaaaaccttcttcaacttctcacatgctacacgcagcctcctacatgccctggcattagaatacacgtcaatgctgtactgttccttaaatcttgctgcaaaatgactaaacagaacctcatcaaagtctctccctcctaagctactgtcaaaagcatgtgaaagtatcttcatttgaccagcctgaaatgctgcaatagagacctgagtatcacaatgacctatgtcaacaaatgcaacataaataggagctgcattgggaaaatctgttttgcaaactccataactaagaccagttgcagtgcaatcatggatcaacctcaaaggctttaacccaataattgctgctgcgtcgagatatgtttgtctctgtaagttggtaaagtatgatggaaccccaataacgcagtcagaaactgcggtcccaaaatccttttcagctatagccttcaagtgagtaaagagcattgctactatttgaaccggggaaaacgtgcgagtctccttcaagtatttcaagcgaatcagaatgccaccatccgggccttccgaagtttcaacggggagcaattttaaatcattctgaacatcagggtccgcaaatctcctgcctattagtctcttcacttgagatattgtggacttagggtgcatcatagcagaaacagcaccagctgaccctataaaccgttgcttctctccaaagcacaccacaccaggggtttcacgtttggattcatcattcaacaaaacatcaatcacacgttgcttcactgcagcaatcacacagttctcatttccaatatcaatccccactccactcattttaatttactgtgtccttcccccaaactacaaacaactaattcaatccaattcaccctttctacgtcaccaacaacaacccaaaagtcaaaaacttcacacaaagctggcccacaaacataagcttcacatttcacagggcgctattactacaaaaaagaaaaagttggaaacatacacatcaaaatgaaaactttatttctgcatcatggaaagcaatagaaaacaatgatataatgtaacaataaatgctttgaatgaagtaaaaaagttctgaaactgaggaaatgctttgaaatgaaaaaagaaactccgagagagagtaaaatgagataagccaaaaggaatattgagagaaaatggaagaaacctgattttggtgaagagggcttcgagagaaagatgaatggtgaaatgtagaagcagttggaggctgcataattaagttgtaatggcagagagacaaaatcgccacaccgcactcgctcaagccatgataataccatccctatccctcgtacaaaacatttgtaatggaaaacacaagctatcgtcaacgaacaaatttgacaataatcagtttaactggggtaaatatataaaattaattatatttattgttgttatttttaaacacggtttcaatattaataatgatatttctcttatctttcttctcatgttcccatcacattttttcacttattatttatgacatttttcatcttttactgttgtcatcacattttttttttcaatggtcaaatttttttttttagtaatttgagtttatttatgttgtgtgtgttatgtaaaaattggtgataaaaataaacattggaatcccaattaagaaaatacctcaagtctctaaaaagagatctgataagaatttaaaattattcgcttataaaagaatttaacatgagattaatgaaaaaatttcctccacgttttggtctcccaaacattaatttccgattctagtcttagaaaatttgttgacactttttttaatcttacacctatctcttgtacactatcatgatttattcatgtttttattttttgtcatacattcatatcaatattttcatatctattacttcccacctttatttttgttcttttaaatttctaacattaattatcataaaatacaattaaatgtataacacgataaaactttgttgcaaacattttttcaattacaaacaactttcaattgtatcttgtgattgatatcttaatttctctttatgttgtaatattgataaaaaatacttttttttaaaaaaacttgtaataaaattatcacagggagactatttttataatactttaatcatttaaatattcaacttttaacaaataaatatttaataaataattatttttataaaattatctattagttccacattaaaattgatttttatttcaaatgatagaaattaaacatgcatgtgtctttataatttgtgggttgcatgaaagcatcaagactttgtctggcatgaacagccttattatcacaattaagatactcaatattatcacagttaagatactcaatgcaaatgatttgacattcacttcttaatttttttcaattatgataataaattataactgaatcaatttgttttttagaactcaaacttttgaaaatcaatccatccaaaaaaaattacaacaaaatttattgcttttcaaaactcaacgaccactcactaaagaccgttggattgttgggttgacacaactattacttcatttctatgtgtattttttgtgttgatcataaaattatatgaaataattttcatggaagtaatgattaatgttaatatgttattgtgagtgcatataaggtgattatttctatttataattgtttatttcatatacaaaatcatgattcgaacttgtatcacttgattgagggatacaatttattataacttgtataaataaatagttgttggcatgttcttcttccttttatatatgtaatgagggtcgataatcttattcctttgatacaaggttatttaatacaatcattttaaataaaacttttaattgtttataaactttttaaaaaaaatatttttttaatataattgtataattattttcaataaagatgtatacttataatagagggtaatttcattgttatcttttttaaaaacaaataaaagtttaattttcacactatctagcatttatcatatcattagtgtgaaaataagctatttgcttaaataaacatagttggtttaaaaaattgagagtttgttacttgtttaatcctaattaagttggacgaacacatttaagaggacagagactgtttttttattcttaacactcaagttcatgacttcaatcatgagtacttataatgaagtttcaatattagaattaaataattgaaattcagtactagtataatgaagtttcaatattataatgaagtttcaatattagagtttcctgagatttaactgaaagctccacatcctcaagcagttcgccaaggaaggggattgtttcagctatgaacactagatattcttctttctagttctccacaacatatttaacaattctgaggcccaatattttagctagcaatttttcactccgtgtctgcatcaaaacctgcaaaaaaccggataaagaaggcagaaatatattcagttgctaaggaatactagtatttgcggggaacaaacatatagcattcaagagctatacatattactgaatacccaaaactataacaacaaactaatgggctaaacacttcaacacataagtgaggcatggatgactacaaaggaccaaagctaacgtattatgaaatggggatgcaagagtacagaagcaagtttagatctttaaagatcattggccggtagggtaggtcaaaaccgcagggatacaaagcgtcaattgacattattactaaagtttgatcaaaatgacataaaagctacagtctatttacaattaaaccttataaagccagataaacatagcagaaaaggtcaactctaacatgactgaaaccctgttcagataaactattcaataagcacttacagaataaggaaaaaaaaaaagagcttaaaatgaattaagcttctctcataagttaaaatcaacttttatagaagttctgatttaggttctctaaaaacttgttttaacttgtgcacacgttaattttaacttaagaaactcaatccattttacctacttattttattctcttagaagttcttgttgagttttcccaaataggacatgattttactatgcttaggtgatgttgataagtagttgttagcaatgccaaaaatggaggtctagcaaaggaagttttggtaaggatttgctcgtttttctagtttgaatgactaatgttggaaagtccacatttgaacctgctggcattgctaggagcccatttgccccgtccaccttgttggcttgctgctgcatcacagctactgactgaatgtttacatgtaagaggagtggattcgttaaattaaaagttttggggggccatatctgtaatttacacttttattatggcctttagagagttaattacttctattgttagacatattcttaatctattgttaaaatgtcttggggcatccatgcacccaaactaatagggagaatagtagaaccagtcatattcataacagtgtttcccgaggacaacgatcatatgcatttcccctcaatgaaaaacaagatagtgaagccagtaagttaccagtatgtcagtatcaatttacttgcccaatcattaacgagtagtagaaaagaatagaaatcataaaattcacctcatgattcaaaggtttccacaaaaggtcagatccaccagtcactgccatttgaccgatgcacacaaccagtaggtcatcaacttccttcacacttagtatattcatgctgtcatccaacagagctggtggatctacaacaagttgtgaaacaagaggtctcaacaacatctgcagcaagcatgatataacagtcagtgagggaatatagcaagcaactatattactgaaggaagctgaaagatttaggaatattttattcctcaatggaatgagaaaacatgcaaagtatttttaaatggaatggaaaaattgccaattgatgcataacctttaaaaattccaataggatttctgtattcaaagggcttctgcatacactagccaaactgataatcacatgtcagaactgacagtgagacaaacttttgattttgctaacagatgccaaggttcaagtgatgtaggtatgtatataatatattagtttcgttatgcgccatttttagctatttttattttccatttcagaattcagttacttaatttcctggtctaatgtcatgaacagaaattgtgaaaaatcttgaacgcttggataaggagaaaaacatactgccaagtccagaaattgatgcattcatgaaggttgtctcatcttataaataatatctgaaaaatcatgcatatatgcaagttcagggaagtcctctaatttgtgttttttttaaactgattttactcaacaggcaacacttgttggtggcaaaaaccacaatgtcgagacagattatgttttgaaagtgcttggtcttgatgtatgttcagatatggttgtaggcaatgatatgctaaggggggtctctggtggccaaaaaaggagagttacaacaggtgatctctctcccctttctaggaatttgttacaattttctttgaaatttggctcttgtagtgatatgtgctcaagttaatctaactggattacctctttagtgtatcatacaaagaaagagggtccaaattcagtctctctatttttttccttctgtttttttaagatgaagttaatgtgaaatatagctttgataggatttaaggagatttcatttagaattttgtttttgactcctaagattggagagttacgacaggtgatctctctcccctttctaggaatttgttacaattttctttgaaatttggctcttgtagtgatatgtgcttatgttaatctaactgaattacctctttagtgtatcatacaaagaaagagggtccaaattcagtccctctatttttttttcttctgtttttaagatgaagttaattatttccacttgtaatatgaaatatagctttgaacaaaggcactaattgaagttaaaaattgtagcaagcaatgacatacttttgcatttcatatcgtaaatatcaattatgaatggaatttaataaatcaccaattttgttcccaaactactatcctctccttaattgtccctaaagtaataaaattgttcaagcaatccttgaagtataggatattcatcagtttaattagttcttaagttgatgcatttcaataaagtttaaggcttaagttgaaaagtctttcaatatttaagagattacttagtttttcttattttatcaaccattaaggagagagtagtatttcaaggatcaaattgatagtttactcaataagtaatgtaaaataacagaagaatattatagtttgacaacaccgctgatattattcaagatggtcaaggaatgtctttaaggtcgacctattggtgagcttttaaaaattaactaatgaagaagttatttttgtttataaaaaaatcgtctcatttttttcttttagaaatacttctagagaagttgatccaaacatgtcaaaaacatataaagagcaatggcgggagatccagggctatattaattatctataagaaaacgtaatgaattattgagctagagtacggacaatattattgaactaatgttattacacataacccataatcaatatttttactaaaaattaatttgattaattagtaagttagtatgagagtgagtaatatgtatgaacttcaaagacatctcgcatgtaattaatcaaagttggcagagatcttgaacctatatgaacatcagctccaattgtcaagtttcagtatctcacttcgatacttggtacatccaatccaacccttttgcagtcaaccacacaaataatttaaatgcaaaatcatatataaaccctaatgcatgtaatcgatatgagaattgttattttttttgtaaaaatatttaactctcttagcattccttgatggcagagaggagcttgtaattgtcttgttcattggttgccaaagcatccttgacgaggcgttcaagcggcttagcttcctcacatcaatctgctccaaaaccttggccttcttcttccctgagtcacctctgttgctcatatccaaagacggcgccatgttggcacgcttctgcgtcggcaacctcagcaatgcagccatttgaagctcctcctcatcttcttccatccattcggcattggaagcccttgcaaacgactccctttcggacgccattctttcttctctttctccattgtgggttcattaggtatttaatatgtttgttttccattccgtattttgttcattcggccctattgtatgatggtttgttttggtccctttctagaaggcaattttctttttaagtatactcatttagcataaatcaaacaaagggaaatcttccaatgcagattcaatgcacttcattaattttaattgttataaattattttaaaattcaaagaatcagacctagaagtattcaatataaatataaatactatacatgcttgtatattggagtgtggaagtagatactgggtaacttttattttattttattttttttttgatttgggggaacttttatattatatttgaactcagagaaatactttttatatatataccaatataaagaccaagaactaaaaatttaaaagatgtataattatgatagggtaatttcattgttatcttttttaaaattttaactaacatattttttttttaacaaacatgttagtatagttgtttgtagtcatttattgtaattttgtaacaaaaagcttttaaattatcatataaaaacaaataaaaatttaattttcacactatctagcatttattatatcattagtgtgaaaataaactatttgcttaaataaacatagttggtttaaaaaattgagagtttgttacttgtcatataaatatgcaaagttgattatattatagtagttattattttgttgttaatttaaaaacaaactcaatattaataatgatactaagtagatattttgcttatattataaacaatatatcaaaataaagttaattgaagaaatatatactatattttaaattatataaaattctatttacttaaatttttagttacaatactttttagaccttaatagaacagttcaaaacacctaattctaatgtttttttttattcttagcactcaagttcatgacttcaatcatgagtacttataatgaagtttcaatattagaattaaataattgaaattcagtactagtaaaaaagttattgaacaaagtaagtaaaaataaaaattgattggagtaaaataattagtgaagggtttgaataatgttcaaatcttgtactgttatggctaatttaaattggttaattaataatagcaaagaataatactatggacattttaaaaaaagaataacatacgtaaagtatgctagctaaacttatattgcaagtattttatttatttttttatttacgaaaattaaaaaatatgtataaaagatttataataacttatgtatcattttcaatcaaaactacgttcttatatatgtatcactcatgcaacttatatatgtatcactcatgcaaccagagtgtttacataaaaaaaaaactctctaatgtcttacctaaccctactcatacaaaattggtcatttataacctcacttggatcggatgttaatctactcattaatatccatttatgccaagacatcttatgcaatgtgtgttttttcacatttgaatacactttgcatgagttgagagttgagaccaatattattcattttttttgctaggcaaagatactccattaatagaaagactggaatagagcacaaggtgtacccacatcaaactcgaaaaaacaacatacatagataataacggaacatactcgaagagtatcacaagatcaatacatatattcctatttcacactacctgctactctatatatcacttttattcagagttaaaaactaaaatttaagaattaaaaatttagttaacctctactttatatatcactttctagtttattcaagactgatcgacaatgttttgtttttttacctcatttatttttttaatgaatagctttgtactgaaaaagaaataaaacaaactccgaaattaatcctaaatttggtaaacgctgttgtcggtgttgtaatttgtaacccagttaaatccattttagagataaagtttatgtgatctaatattatgattttgttattttatcattggatccattttaaatattttctaattcagtacaattcaaattacttatagagaaagcccatcaatatgctgattggttttggctaaacatgaaatttcttcttcatctctttgtcaagcatgagagttgtgtccgcttcagctacctttgttagatagttgttgattcttcttgttgtcttttatttcatccactaataattattatcaaaattatatgaataacacaattaatttatagtttaattattaaattaaaatttattattataaaatttattatgtaaaattatatataatattaaaaatttaatgttatatatcaatattaactatttttaatataattagtttattagtttaattggagtgttgtgttcaacctcacaagttctagacatgtatgaaacataaggcgaatcatatccataatcacaatagtatggagggaaaaactttatacacccagaaaaagactaatacaccattccagaacagtgcatttccaaaaataccctcacttttattacacttcatacatacggattcgtgaatctgtaagattcttacggatttgcgaatccataattttttttgagttatacggattggacaatccgtatgggccatacggaatctgcggggtcccaaatgaattggcttattcaaaaaaaaccccgttctttggaagatctatctcgtgtctagtactgcatggttccaccctgcaagaactctgaatcattctcttgaagctcatgctcttcatcataaatgatccgcttgtcccaaaatgacctggcccaacagggaaatcccaattcattgggcctttcaatacaatcaaatagaaagccccaagggcgccatattctaggagcccaaacaatgtgattgaaaaaatcctcctctatctgttgtgggtcgaggactccctccccttcttcaaactccgattcatatttttcatagagaaatctctgatcaacgatagaataagatccattttgaatcatatttaagggattccttggttcggaccgaagaaacaatgtcactcgatccttatcaaactcactgcaatctttttctgtacgtgaggatcccaccagagcgccttctacttctaataggccatgaactagatcagaattattctcaacgagtccataagatgtgatcccatttttttcatcaggtctgggtagagaccaaaggtcttgagcgaccgatctggcagaacaactcaaaaggtaaagaagtatcgttaatttattcatactcgttccaagttcgaagaaccatttgtatccgtatggcccatacggattgtccaatccgtaagtaagtttttttttaagttaaaatatatttttccaaataatttaaaacaatggcgcatgtaggtctcttattaacgtaacgctccaaccaactgagctaataggccaattatgctaaaaaccaattaatgttatacatgtaacactaaattttttaatgtatatttaatacacgtataagtttacataataaattttgtaacaattaattttgatttaataattaaagtattttttacatataaaaatcatagttttaaataaaaatcataattttaataaaaatttgcaggactaataaaaattatatttgtatttacaggttaaattaaaaattatatctgtatttatagtttattaaacttgcaaatttttattaaacttatgatttttatttaaatctatgatttttatatgtaaaaaatactttaattattatatcaaaattaattgttacaaaatttattatgtaaacttatacgtgtattaaatatatattaaaaaatttaatgttatatgtatcaacattaattagcttttagtataattgatctattagctcatttggttgaagcgtcgtgttaataacctgaaggttaaaggttcgaaacttacatgtgtcattatttggaaaaatattttttaacttaaaaaaaaaaacttacttacgtaaggttcatacggattcacgaatccgtaagaatcttatgtattagtcttttgctggtttataaagtttttccctagtatggaggaaaataaaaatgtgtacaaaaataatggcaatggattaatcggaccagcccaatcattcatcactcggcccattacgtagctcatcgtcgttcacaaaaatgaagcttaaccgccaacaattcctgcactgcaaactctttctgccgcaacaacacgcaacacacaaaccataaacctagccccaactttccttttcatcttcaccttcaccttcgttttcaagctacagcaatgagaaggccgaaatcgaaggagtttcgcaagcaacagcgagtttcagaggaggaagagataagcctcttgaattcatggatccagtttcagccaccggactccggttcgaacccaatgtcgctgccgcgtctccccaaaaactcccccgttggccgcctcgaagataacacctactcgcgctacgccggcgcgtcacgctttgatcaatttccactctcgaagaaaaccaaggacgccctaagagagtccaagttcgtggccatgaccgacatccagagagcgtctcttccccacgcgctctgtggccgcgacatcctcggcgccgccaaaactggctccggtaaaaccctcgctttcattatccctgtaagtgcttcatttctcagctccattctcttcggattagggtcccctgtatttctttttatttaactaatacaaatattatgataataatataatcacaagattagctcaaagtgagaaaatatatagtaaatagaatatgatatattgaattgtgatgtttatgcttgttattatttgtttatcgtggtttctgaatgcaaatattatgataataatataatcataacattttactaataagtgtggaaaatcaacatcgaaagttcaaagccatgagaagctgatacgtgtttgggcaaggtcattgatttaatatgtagtgggtgaatagatggtatattgaattgtagtatttgtgcttattgttatttgtttatggtgaattttgaatgataggtgttggaaaagttgtatagagagagatggggacctgaagatggtgttggcagcatcatcatatcgcctacaagagaattggctggtcagttatttgatgtgttgaaggttgttggcaaacaccataattttagtgctggccttctcattggtggtcgaaaggacgttgacatggagaaagaacgtgtaaatgagctcaacatattgatttgcacgcccggtagactgctgcaacacatggatgaaactcccaattttgattgttcacagacgcaggttaatataactttttttcttatatgtgatagattaacctcaatctgactctgaaattagagttacaattaagttgtttgttttatatcactatctgtttcctcgtgtctgtttttaattgtacttgggtatgtcaagattttctatccttaacaaccttcagaaaaatttgcttccatgcctaggtgatttagcaacagtggttgaagcagagtataggtgccgtttaatttttatatgctttaggcccttgtaaagcataaattttttattttgtcttccaaagtacgtgtttatttgggtcaaaccagaaaacagatatgtatcattagatttgatcaatatagctgatggttgggtggacttcccggatataggttttggtactagatgaggctgatcggattctagacagtgggttcaagaaggaactaaatgcaataatttcccaactaccaaagcgtagacaaaccttgcttttctctgcaactcaaacaaagtcaattcaagatcttgcaagactaagtttgaaggatccagagtatctgagtgtgcacgaagaatctgtgacttccactcctactctgttgaagcaaattgtgatgattgttcccctggaaaataagttagatatgttgtggagtttcataaagacacatctacagtcgaaaacacttgtctttctttcaagctgtaagcaggtaactccaactccccttttctgtcctgtttcaagaaattctttttcttgttgaagggaattgtatgttataggtttctattacaattttactgtcatgccacttgaaaagttgcaccctttgatgcttagccaatgcatggctattggctagtcatcattttcaagattttttgtgcaattggagggaatgtagtttgattttatgattgaaacttgaaagttgtctcattagtttcatattcaatggccaagtaaataattgttttgttttatttgtagctacatgatgaagttcacatgcgtagaacttctgttatggttttcagttgcgctggttatggttattgtaatgagaaaatttttaaaggatttttaggatgaatttttccataattctttcatgtaaacagggaaaatgtttaagatgtggtttttggtgcaaattccctcttttgagcttgactatcttccataatgttcacatccctgcttaataggtaaaatttgtctttgaagcatttaagaaactgcaccctggcataccattgaagtgccttcacgggaggatgaaacaggaaagaagaatggcaatatattctgagttttgtgagaagcgctctgttctcttctcaactgatgtggccgcaagaggccttgattttaataaggcagttgactgggttgttcaggtgagtctcatcctgcttttggtttcctgtcttggagcaagttttagggctttgtggtggggtgttggaagcaaaaagcttgtttttatgttcagtctctcacttctctcttgcatttgtaggtggattgtcctgaaaatgtagcttcttacatacatagagttggtcgtactgctcgatataaatctgatggaaagtcagttttatttctgttgccttcagaaattcaaatgctggaaaagttaaaagcagcaaaggttccagtgcattttaataaggtacattttccctgcaaattaatagtatgcatgcaattccaattttcatttgaacatcaaggtgtcacttttaaatctgcttcacttcagtcttatgtttgtctgacatttgctttccatgtttttgcaattgttgattattcagccaaggcaagaactactgcaaccagtttctagtttgttggcatctttactggccaaatacccagacatgcagcatcgggctcagagggcattcatcacatatttgagatccatccatatccaaaaggataaagacatatttgatgttatgaaactacctattgacgagtattcagcatcattaggtttaccaatgacccccaaaatccgttttctaaaccagaaaattaaatctaaagatgtgacaactaaatcaactttagttgagccagaggattcagacaaggaaactatctttgaggtttccaggaagaagctagacacagttgctttcaaggatgaggaaaccgaaaatgatattcttcagttagcggatactgcaaatgaaggtgaaattaagtcatctgaaattgaagaaataatgtacgttcccatatacatttttacagtggtacagattaaaaaattaggctgctttctgataatgctgcattagtttttttatatatgattatggcaaggggctacactagtcttctggtttcaaaattgctgagacaaattgatatttgaatataacaccttatgatgtggctaatagaaaaaaaattcaaacttagtgttgggtataaagttggatctttcatatttcttggcgggagccattcatctggagctttgaatttcttcctccattattattcttaccaatttagttctttcctatgcagaccagcaactcgtgtattgaagaaaaagaaactcaagattaatgtacacaggccacttgggactagggttgtatttgatgatgacggccacacacttcctccactagccaggatagctgacacacaaagtggcaaagaaatgctgctcgatccaggtattccatacttttcaactgcaaactgaagctgaaggtgaaattgttgcttgtacatgtgtatacgtgtcatttcgttccttgttttcatagttttgtgaaaataataaaaaatgttttaaaatgttaaattatagctacacacttgtttaccaattagaaaacccttttgtattttctgcaatcatcattgaatttgagaacctggctagatctcattctcatcagatcactatataccattttggtcttcagagcattgaagtagctaacttacatgtatgttcttacttcataagcatggactatttgtacattttgccacatcatctttatgtcttgatgcagaacaaaaagctgaatactatagaaggatgcgagatgatttgaagaaggctgacaaggaagacaagcttatagagcgtcagcggcttagagaaaaaagaatcaagcagaagttgaaatggaaggctgggaatgcggaagaggacgaccaagatgatatatctgggtcagaagtagatgagactgtagatagacggcataaaaagagtaaaatatactttgatagtgacagtgatgagggtgaaagaaatgaagtttcagggaatgcaggtataactaccggtgcggttacgttggaggagcaagaagctctggctttgaaattgttaaattccatgcactcataggatatgcgtaattcagctggacattttgtgacagcaaaaactggtgaaaagagagcaattcctgaaacattttaggagttctgttaacaaaaaattttgatctcccaatttttttctgtcatctctttcaagaaacgtatacatagaatcaatttactgcttttatttattttaactaaaaaaaatgggactaaaggacatccttgtgtgtaccaaacacgatattaaatattattaggagatattcataatagttgtacttcaaaatctgaatcgtttacaggaaaaaaactagcaccaaaatggtgtctttgccccctgttagttagagaccccaatgaagtctatagaaatgtcagatcaaatgttttgtggaaatgggccgagtttatggtctcgtacagtcgtacttattccgttgcattgtataggcgtggaagaaacttgagtgttctcccgttgcttagactgcgttttggaattaagacaacaataaaaggatatggacataatttcaattatttatgagaaacaagaactatcaacgggagcttttttggtttgaaaaaaaaaaacttttggatttctgtttattacaactattataaataagaacttaattattacaactattaaattaaattaagggtttagattaaatacttaattacaaatcttgtcattgataatattttttacaaattttgtgtattttcttttaaatggagatgatagtaatgacatgactggtttgttgataagaaaatggagaagaaaacaaaaactccatccatccatctggtccagtcaacccatgttcatgtattttatttcagcttgacattgaagtggggcgcagcaaggaaattaagcaaaaccgcgtagggcatcgtgttaatattttaaatttatgaaagagagaaagagaagtagggaggcattggccattaggaggagtcaacgagacaagcaagccaccttctgctacttctcatccatcatgtcgaatgaactcaaaaactacgatgtttttctcagttttcatggcgaagattcccgttacaccttcactggtactctctataatgctttgcgcagcaagagaatcaagacctttttcacagaacatgaatatgatcgtaaactacacactcatgacagccaaattccacactctactcttgaagcaatcaaggaatcaaggatttcgatggttgttttctcggaaaactatgcatcctcctcaagatgtcttgatgaacttgtggccatccttgagtgtaacaggacgataaaccaactggtgtggcccatcttttacggagtgtatccgtggcaagtaaggcaccagggcggtaactatggagcatctatgtctaaattagaagaaatatttagagattccaatgagagggtgaagcaatggagagcagctttatttgaagtcaccaacttgaatggatggtgttaccaaactgggtatgcttaattttagttgattaagttccattattaatctctacaactgctagcatagcatggcaccacttctttattacttattgtatctgtaatctgctgaacagtatgtctgatcttctaattatcgttttagaaagtcactttgttttgtttaaccgagagaaatacatgtgtgctgtaaattaaaggttctgtttccagtttcagtgtagcagtagcaatctgttctgtgcatacatatagattagtcaagcttaagtcaacttataattctgattaatagaaacaatatggttgtccatgctcgaatacccctggtgaattaaaaagacttgtgcttttataggaggtaccagtatgaatatgaattcatcgaaaggatcgtggaatcagccgtgcaagccttgcccggatatgatgtttttctgagttttaccggagaggatacccgctatactttcacaggttttctctataatgcctttcgccgagagggattcaaaatcttcatggacgatgaggaattggagagtgggaaccaaatatcacagaagcttatgggagcaattgaaagttcaaggatttcaattgttgtgctttctgaaaactatgcatattccacgtggtgtcttgatgaacttgccaagatcattgagtgtatgaagaccaacaatcaaatggtttggccaatattttacaatgtgcaaaagtcggatgtatgcaatcaaacaaaaagttatggtgaagccatgactgaacatgaaaaaagatttggaaaggactctgagaaggtgcagaaatggagttctgctttgtctgaaatcaacaatttggaaggagaccatgtcaaagaaaatgagtacgtaatgcttttaattagttacttaatatatgcttccctcttaagtgatattgaccatctatgaaatgctaaacatggcatagttcttgtccgagacatggggtattgtgtgttgttttgtttggagcagtttttgtattttgtacggcaatctgttagtgagaagattaattagtcgagcttaatattgttgttttattgacataaagtctgattaggagaaataaagtgaacacagcggatgaatgtcttaaaagaccttgcacttttgtaggtaccaacatgaatttatcgaaaggattgtacaaaaggtcattaaacttgaaggtagcaagcatatagcaaatcctttccttttatccaatgacagctacgaggaagaatgagtgaaagtcggtcaagtatatgctgtggagctgtgtgactaattgattgtaacatcaataactgcccttgaattcagttgtgcctatcaatgttgtttttacatccagttcaattcctaaggtttattgtattccttctaaatcttgttcaattctcgaggtctgttgtgttttttctacatcttgtttcaatgttttgtgttgattagataaaaaaaacaagtggtactattttgttttgtcatattggcattaggtaaggcaccgtgaaacaaaatttaaacacatcgccttctactcacaaaaataaaaacagagtatacaaaatctatggtaaggttaaataagttttcatcattcatctatttcagaattccatttttaattctctcaatcttctttatccaattttagtctctattttttgaagtaagtttagtctcccacgttaaataaaaactatcaaatacttatatgtccaacaaaattacatgtcacaacacacatgatgtaatcatgtgacaccgatgtgggtgatactaacatgtttagtcacatggtatcatgttttctaagtctttagaaatttttgaaatttaaattttagttcctaaaaaattatcatctttcaattttagtcaatataaatttgttttatttaatttaagtcctttaaaaaaaatttagtttttaatccttaattaatttttttaatcttagtatagttatgctttagtgatttgttggtcatgagttcgaatatgtaaaaagtttatttacatatgcaagagtaaggttgtgtacaatatctttttccttatttttgtataacaaggagcctatgaacaatgtgatacataatttttttttctagtttaggtatttctagaatatttaatctcttcattattcaccttggtatcacaaatatcatcacaagtatgttcaaaccattatttggttaggtcctacattttgtcccaattttggattggatttttcttcctacaccagctagtgttcccatacacccaacaataaaatgaaaaactgaaaatacccttccgtaaggttcatacatattggccaatccgtatcctttgttgtcgtcaagctcagtgccctcccagcctttggccaactcaccgacatcgtcggggtccccacctctaaccgcatggaagagaaggcccactccctcggcatccccctctctatcctcgaccacaatccccacctcgatctcgccatcgacagcatcgacgaggtcgatgaggcgatctgtaatccataagattttacgaatttgcaatccataagattcttacggatttttcaatttgtatgaaccttacggattgtcaatccgtatgaatcttatggaagaatattttttatttttcgttgtctttggtgggtgtatgaagaaatttgtctagtgcatgaaaaaaaatgcttatggatttctgttattggaggttcattttgagctatgactcttgcactttatttttattttgaatagaatatacaattaataatttctatatgttcaaagtaattggatccacatttagacaattatattttttttctctctatttggcgaaaatattgtgtaagtttgtaattaattagaatttaggttgaaactaattattttatttgatgtggttacttattattatatattttaatgatttcatcgtattattaattgcttgtgatacaaagttaattaatagttgtgatgtaaagttacttatatttttgcatgcaattaactatatctaatagtaaataatttttagtcacagtaaaatcaactatatttatacatacaatataatttctgcattctgttataattgtatttttaggttgttatatataaatagttgaaaaagaatgataattttatatcatcattaatttatttataaattttattgtctattattaatctcataagagatataaataaaaaaagataattaatattaccttaaaataataataaaataattattttgatatttttttcttgtgacaattataattagattaaggaaataatattttttttcaagtggtgatgaaatgcacaaatttgagtgggacaactataattttcgaatagaaaatggagaagaaaacaaggactccatccatgtattttatttccaggaagcagcaaggaaattaagcaaaagcgcgtaaatgatagtgtcagcacatcatataatatcttatgttatctgcttaatagtttcattgcgatggcggatgaagggggaattgcgaagtggcgctacgatgtatttctgtgttttagaggggaagacacgcgccacaccttcacaggtaatctctatgctgctttgcggaaggcgagattgaggacattcttcgatgttgggttgaagggtggtgaccaaatctttgaagctattgttcaagcattggaagcatccaggatttcaatcgttgttctctccaaaagcttcgcgtcttcctcgtggtgccttgaagaacttgtcaagatccttgagttaagggcaacaaagaagcaactagttattccaatcttttaccacgtggatccctcccatgtaaggaaacagactggtagtttcgaaaaggacctgattggacatgaaaggcgcttgggaaaggactccgagaaaatacacaagtggaagtcagctttgtatgaagttgccaccttggccggatggtgtttcggagacggaagctgcaggtatggcgttttttcttcttcttaatttagctagtaccgcttcttaattttaaaaaaagaaaatgaaaataataattttttgtaggcattcaatactgccttacactttgagagaaaaaagaaacacagaacaacgtgacattaataagagagataatgaaaaatataggtgtaaatatgtttttaatagtttagtgttttttttttaatttttgtaatttttgttatttttagtctttataaattatatatatatatatatatattttacttttagttttaaaattactttaaatagtactctagatagtaaaaaaaaaaaagtcctataagaaccaaaataaaaataaacattgtttgtaaggattaaaacaaaaaataattttataaaaacaaaaaaataaatattaaattataagaattaaaaagatatttaagttaaaaataaaatgtttcgatccaatgaatttttagcctaggatggtgtttatgtatcattgttgaaattaaaatttcatatactaagttaagtaactcatgccgattattattgctgaagtcatgtaaacttgcattttaatcctcaaagaccaaaaccacttgtgatatttgcacgaagcttttttccttgatttataccttattgaatattctaacttctgagttgtcaaatgactcgttaacatgggcttgagccagtttatgtctagaattgcaaggctttggccaatattcttaaagtgacaatctaacgtaactagttaattctcctttcattcttaaaagaaaaacaaaatagaaaccaacaataattatactctttgataaggaatttgttttatgaattatcacactagaatttattattggtaagaaacaatctaagcttttagctaatttatcaagttaattttactttgttttgacttacgagttttaaggtttgaaatctttggggagattaattattcaaactcaattttattatattaaaaaaaattcttttaagcactctttattaaaattataaaatttatagatctcactttttacttaataattttcattcataatttttaattaattgtaagaaatgtgcaagtgtgtgagagagtttcttgcttgaacccgtcttaaagtaatcaataatagataaagaaaaacgtaaccagtgcatgaatgaattaaaaggtcatgtacttttttgtaggtaccaatatgaatatgaattcatcgaaaacattgtgcgagaagccatcgccattgtaccccgctatagcatttttctgagttttagtggaaacgatacccgctcctttacaggttttctgaacaatgcattgtgccggagtaggtaccaaaccttcatgaatgatggggaccaaatttcacaatctactaatggagttattgaagaatcaaggctttcgatcattgtattttctgaaaactatgcacgttcctcgtcctgtcttgatgtgcttttgaccatccttcagtgtatggagacgaaaaaccaactgatttgtcccatcttttacaaagtgttaccgtcggatttaaggcatcaaagaaatagctatggtgaagccatgactgagcatgaaaatatgttgggtaaggactctgagagggtgaagaaatggaggtcagctttgtttgatgtcgccaacttgaaaggattttacttgaaaaccgggtacaacacatattattcttttactttttgcttattttcatgattcatgtctattatactagtaatagttgatgataataatcacttaatatgtgcatcgttcttgaaattctatgaaccgtttaatttgaaatccgttcatttaaatttgactttgttaacaaggaataacgttgtgagagacattggggtacggagttaaggctttgtttagagtttgcaattctgtttttgttgttgtgtggtaattacttttgtgcggatttactttgataattttagaaagaaaatgaaaattgtgtatgaatgaactaaaaggccttgtatttttgtaggtacgaatatgaatttattgacaaaatcgtggaaatggccagtaaaatttaaaatggcttaaatcgatcaagccctcgctcaagtgtcaactagaaggcagaactgatcaattcaacagattacagatggttctatgagcagtcattagctcacaaattgatagtaatagtcgtaatgcttacaatcagcactgaggaattgatttggaagtctgaattttacttagaacattagcaatttctagaaaggtgaatatatatgtcctgagggccatggccagaggcctgtcatcttgaaattgtgacacacactctcgtttaagtcatatttactttgatttcccacatgtcatgcatatacaaataattgtatgagttagattaaagaagctttagcattaaacagattgaagacaattacccagttaagatgctgaatgatgtttttgttgagaatcaaccgacatagttattcgtgatgtatataatcgaatttcgtaagacacaccaaacatatccttgcatgataacttttgattttggggtgtatcccgccgggaagatattcaagattgtgcagtgtaacaaatacccttaaaaaatgattaacgcattatgattttagttagttaatagtaaaacgattgctgcaagtttaaaaagatttgaaatagtttatagtattttgaccgtgaaattttgtgcttgttttagtcgacacaatcccatagatatttgagaaaaaggataaacattttctctgaaagtcttgtatcttcctcaataggtactgtaccataggttaatgttaaatttttaacatgagaacaaactaaaagtatgtaataaagagtaaagtgcaaattgatcatagaagaactttaaaataaaagagtattgacgaaaataaagtgcgcaaaaaaaaagatacaaaaaattaaaggagtaaaaagtttggagaagaaattgagattgaaaaaagatgaagatttaaagggaagtataacaaatgtaaaagaaaacgataaaatgaataagataaagtgctgaaattaaaatgtttgagagtattgtaataattcattgatccacaagtgtcacgatgagacaagaggatatgtgagtgtttacaagtttcaactcttattacaaatttttaaatcttcctcatcgataactttaatattcaatgtcaatcattaatgtcctttgtctttggtattcgtttttaatatattcttcaagaggtatttgtagatttttgttcctctaatggttaaactcaaatgctttatgaaattattgcttaaaaacatgttattttcccgtgtcaggtgacctctaaaaaagatcaagctcaatactgggctgattcttcaaagccatataaatttatttcagtgccggagattgcataagcctttaaaaattccagatttggaaagtcggtagaatccatgtgtactgctccctttgataaattaaagagtcatccttcagctttgcccagaactagatttgttgtgccaaaatgggagctctttaaggcgtgtttctcgcgcgagagaccttgatcaacaggcataagtttctctatatttttaggacctgccaggtatgtatatatactcaagtaaataaggatgcacttgtttctatatatagttttcaattcttaagtttttttacaagtagaattcatgataagttagcctaatgtttgtgatttcttggtaccacttacagaatagttgtcagtaaaatttgttggaattgtcacatgcacaatgtttgtgcaaacaaaatttcatggtaaggatgaggaatatggcaatctctatcaatctgcactaattttcggactcatacacatgatgtttaatggtcattctgaattgtcactcatgatagcgtgtcttttacaaacagagaggcaatttattttatcctggacaggcatgctctttggccacttgtattcttggtgtaccttattcccttgttgaagctatagtatacaacacaagaccatataacagcttcaacaagggaataaggtacaccaagaatccaagtggccaaagaccatgcccgcccaggatcaaataaattacctttttgtttgtaaaagacatgctatcatgagtgacaattcaaaatggccattaaacatcatgtgtatgaatctgaaaaatagtgcagattgatagatattaccatattcctcatccttaccatgaaattttgtttgcacaaacattgtgcatgtgacaattccaacaaatattctgtaagtggtaccaagaaatcaccaacattaggctaacttatcatggcaaaaaaattaaaaaatagcagtttaaataaaaaattacaagaatacgacagtttcaaaagtattttgaaatctattgtagtcaatcacgtcctggctggacgtgttcaaacacgccccagccaggcgtgattcaggtccattcacgcccttcccagacgtgtttggtcacgtctccaccagttgggataggtgaggcagtcacgccccacccaagcgtgatcttgtgtcattcggcgagaaaatggtgttcttcttgggaaaacccggggtggcgctggaagacaagtttcttatggggaaagcttttcaaagtagaaagtgtcgagtaggacctcgacgatgatgctagcagcagcacacacgtgtgtgttaaggacggccagagatgccaccgtgctcgccacgaacggacctccaccgttgaacccactccaacccatccaaagcaggcctgcgcctgcaagcaccataatcatgttgtttgatggaaatatttctgtccttttcagatcgtggacccacctattcaaatcaaacaccatcacaatgcaaatgtcagcattttattataaagaaaattaacggcttcaaattattcacacaacaatgtttgtaatcctttctcttgaatattcattgtatatttgtacatataaataaaattaagagtgaaattaaattttatttcaaaagttgtttggtaatattacgtaccataatcattcatttttttttaaaaaacaatatcacccacattatttatattttagttgaaacatgaaaaaatctttttttttcttctttatgcgatatgatgcgtggatatatttttacatatattttaattaggtgttgtatatgtataacccaaaataattattatatacctttcaattatgataattatagtgcatatagttaacaagatctgcattttcaaggccgtttgtttgagttttattttagtaataatttttaaaaaattttaaaaaattacaatattaatgagattctttaaattgtaatataagattcttttttaagttattgatacaatagaatatttattaactttatgaacgattaatctttgtaaaaaatttaaataattaacattagtcattaattggatacaattaactagacaaagaaccaattattgtagggtctttactcttaattcttttatacatcataatgaaattttacataaaaacattgagtctaattttatttagattaacatgttggtgtaagaatttaaaaaatatatcacaaaatttatttgttaacttaaacacaattatgaatttttatactaagagtttgcttttaaaaaaacaatgatttaagtgtttattcataattttgattataaatgagtaactaagacatacgactagttatttaaatgaatttttgggtaaaagtgataagttagagaaaagtgaatgacccaataagctgcagtgaaaccagcaactccggaggagaggtgaataacatatccgccagagaaatcaataaccccaagctttgctaaccagccatcggggcaccaaatgctaaaggcagtgacggtgtacgaaaaagtaagccaaagcggcacaaacagcatccacccacgaaagttcatcctcccgagcaacgccccagctatcaagatcaaagtgatccccgcaaaaacgccctgaaaaaacaccatcgtagcagtgggaaagaatcccagaaaagcttttcccagaagaaacttgtcgtccagcgccaccccgggtttccccaagaagaacaccattttctcgccgaatgacatacggaatccccacgccatccagtgaagaatcacgcttagcaagatcacgcctgggtggggcgtgactgcctcacctatcccgcctggtggagacgtgaccaaacacgtctggggagggcgcgaatggacctgaatcacgcctggctggggcgtgtttgaacactgcaatagatttgaaaatacttttgaaactgtcatattcttgtaattttttttttaaactgctattttttaatttttttgtcaacttatcatgaattctacttgtaaaaaacttaagaattgaaaactatatatagaaacaagtgcatccttatttacttgagtatatatacatacctggcaggtcctaaaaatatagagaaacttatgcctgttgatcaaggtctctcgcgcgagaaacacgccttaaagagctcccattttggcacagcaaatctagttctgggcaaagctgaaggatgactctttaatttatcaaagggagcagtacacatggattctattgactttccaaatctggaatttttaaaggcttatgcaatctccggcactgaaataaatttatatggctttgaagaatcagcccagtattgagcttgatctttttgagaggttacctgacacgggaaaataacatgtttttaagcaataatttcatcaagcatttgagtttaaccattagaggagcaaaaatctacaaatacctcttgaagaaaatctgcaactcccttgcaggatggaagtttgaagccaaatgattcaaaaaactccagcacgtctcctatggggccttgatattcaacgtacccctctgacagaagcagaagatcatcaaagagctcaaatgtttatggtgcaggttgaagtagagccattagaacagtagcatccatttggtgaacaaaatttcctatgcattacactacttgggatgtggtagagctatcagaacagtagcatccataaatagagcttttcgtggtccaacaatcatttctcttggagaaaaaaatatgaaaggcaaaagtatgtcattgcttgctacaatttttaacttcaattagtgccttcataatgtcttaatcttctggtatagacacagtcaaaacaaatatggattgaattttgtatcatctataaattattgttcctagaacaaatatggattcaaatgtatggactgtgttagcttctctattattatatattaatttccaatcttaggagtcaaaaacaaaattctaaatgaaatctccttaaatcttatcaaagctatatttcacaaaacaagaaaaaaatagagggactgaatttggaccctctttctttgtatgatacaagaggtaatccagttagattaacttaagcatatatcactacaagagccaaatttcaaagaaaattgtaacaaattcctagaaaggggagagagatcacctgttgtaactctcattttttggccaacagagaccccccttagcatatcattgcccacaaccgtatctgaacatacatcaagaccaaggcactttcaaaacataatctgtcttaacattgtggtttttgccaccaacaagtgttctgttgaggagtaaaatcagtttaaaaaaacacaaattagaggacttctcttaacttgcacatatgcatgatttttcagatattatttacaagatgaaacaaccttcatgaatgcatcaatttctggacttggcagtatgtttttctccttctccaagcgttcaagatttttcacaatttctgttcatgacattagaccaggaaattaagtaactgaattctgaaatggaaaataaaaataactaaaaatggcacataaggaaactaatatattatatacatatctatatcacttgaaccttggcatctgtttgcaaaatcaaaagtttgtctcactgtcagttctgatatgtgattatcagtttggctagtgtatgcaaaagccctttgaatacagaactcgttttgctcatggccattgtatgttatactaccacttttctgcacaggtatttaaggatcaaagttctaatgtaattctatgatgacaatggaattttgaagaatgctatggcgtatcaaaattcttggtatgctgacaattcagaaatggacttgttccagttagataaaggctataaaaatagaatcaatcttaattcctattggtataatgatttaaagcacattggtttcagtgtttcacttgttattgtgctataactggaatacactaacaagacgatcattcatgtaggcacaattttttactcaattcctattctataaaaataaaaaatgttgactaaataaggatgccctacgtaatagcttaatatttgtttcaaagaaccgaaaggtacctataatattagtaattacaaattgtaaagtaatacacgtatataacccacacggatgatggttatagagtttaatttccatgaactccaaaatttaaattgtcaatcaattatgaattataaagtagttatcgtaaatatcaactaacttactttatatgacagtttgtaacttaataacagtgtaaaaatcctgtacataataagtacatacaatatttattagtcataattaaattaatgttaattattagttctttaggaccgtagagaatgttaatcctgcatagaatttgtactaccttgaggttgctttcaagtttcctgcaagagccaaaagtaaggtagttttgcccgatcctggagttcctaacagcaacgtcatcctacacaacaacacataacgttaagcttgatattcattacgatataaacatatatgaaactctggaattttctccatagaaaaaattctattataaagtaattgagagagagaggaggtgggtaaagagggtggagcacggtctttataaaattagtagtagttgagagagagagggggtgggtaaagagggtggagcacggtctttataaaattaaaagtagttgagagagagagggggtgggtaaagagggtggagcacggtctttagttgttttgactatactttgtattttatattctaaattttaattattaatgttatttttttataataagttttgttaataatgttaaataaaaattaaatgtatttaatattttattgtacaaaattaatattttaatttagtgattaaaagtattattaagaaagatgatgtaaaaagatttaaaactgttggatgcgtggaagatgggtgttgctgatcaagtgcagaattcaattcaccccgtgacccgtaacaaattaaagtaaattctgcagtttctataatggcacatgtactccacatgcattctcataaagcaattattgatatatcatttgaaaagactccacacgatttctaacagggtatcaaacgaagcttcattaatattcatagcttagcatgggttcagcctggaaggaagacaagcccaactttgacccacttggtattttaaaaaggatttgatgatgcctatggtatgagtagtgtagcgggaacaatacaaatattaatctaatatataatcagcaagtagattcttatagtcagtatgatagctaatttattataaataaataaaatgatggttgcagaatcttcatcttaaaaaatattaatgtttactttcaattatgaccatagatatatttatatttttttttaaactaatattttttttgaaattttattgaggatgaaataatcacatatataatataaatgttatatacaattagttttttgaaaatcacatttaaaacaaacaaaattcatatataatgtagaaaataaacttaataaataattttatagcattttcatcatattattgtttgataagtcacctaatgtagcgtgcacttagtgtaacatgaaagtgcactgccattatttgattctccatccataaactccgctgtcaaacgtaatgagtaagtctgtgctatgtttgacattaagcaaaatgttacaaaattaaataagctattatgtcatactaaaaggtaactaaatttcagagttacttaacaaattatataattgtccaactttaatttgattaaaaaaaaattgaaacaactaactaatcaatatgttatgttggccttagtttggcacaccttgtgttgttactaagtgttctaataatgtataaattgcctttaaaaaaacaaaaaatacgtcatgtaattacattttatataaaattataaataatataacctgaatcttgttccttggaagttttccactaaatggaacaattgtgtttatagatccagtcatattagttttaaagctacacgtgtctatagataaggagactactctgcagatcagttggctaattttgcagttctcagtcgtaattatttttgctgggtttcagttccccctttttgctctcaccgttatgcccgtaattttaatgagctgctatgagttttgttgatttggctatggaccttggtctaatcctcccatattttgttttctttcttcctttgtatataaatttccgttgggtattggtataaaatcttagaaaataaggatgtcaatatagttgtgatattttttatatttttatgtcttatccgtcctttttaagaattatatataacttataatagtgtatgttttgatttcataaacattttttatagtctgaaaatcaaaagttaaaacgtgaataattttttaaacttttacctggccactttctacgtaatatatttcccacaattcctttcattgatcatacacgaaccatttttcaagactactgaaaaccttcatccttaaaatacttgattttatgatagaattaaaaattattataaaaaaactgatgtgacagttgcctccatcaatttatcagtttcagattctttttgtaaaagaacaattaaagttctctaaaaaaataattaatgtaacaacacgtacctaatttttaaaccagtcatcaatgccacaagcaagcaggtacattgcttatccattgtcttacttcctaattccactattcttaatacggccctaataaagctaccaaaattatcaaccattattttataaatgaaagagatacaaaaaaaaaaaaatagaatacttttcaaaatataagagactgcaagagtcttggattaaatttctctgggaatgtagtatgatattaaaaaaaatatcaaatttcaaaataaatcaatttaatcctatttttatactttttcttctctctttattattacaaatattcctcttaaaagcattatgctataaatgattgagtgttataaaagttgaaccagaaaaattgaactttaacctttatcggtatatataaatactaattttccttaattaaccacaatttacactggcctatcgattatatttcttgtttgattacatatctctagctctttgctcatgtcacaaccataaatactgccctcctaatcttacatcataggtattgccgaaggctttccccactcagagactccatttcctgcagaatttcctgagcaagagatttaactgaaagctccacatcctcaagcagttcgccaaggaaggggattgtttcagctatgaacactagatattcttctttcaagttctccacaaaatatttaacaattctgaggcccaatattttagctcgcaatttttcactccgtgtctgcatcaaaacctgcaaaaaacgggataaagaaggcagaaagatattcagttgctaaggaatactagtatttgcggggaacaaacatatagcattcaagagcaacacatattactgaatacccaaaactattaacaacaaactaatggactaaacttcaacacataaataaggcattgatgactacaaaggaccaaagctaacgtactatgaaatgggatgcaagagtacaggagcaagttcagatctttaaagatcattggccggtagggtaggtcaaaaccgcaggcgtcaattgacattattactaaagtttgatcaaaatgacataaaagctacagtctatttacaattaaaccttataaagcccgataaacatagcagaaaaggtcaactctaacatgactgaaaccctgttcagataaactattcaataagcacttacagaataaggaaaaaaagagcgtaaaatgaattaagcttctctcataagttaaaataaacttttatagaagttctgatttagcttctcaaaaaacttgttttaattcacgttaatttcaacttaagaaactcaatccattttacctacttattttattctcttagaagttcttgttgagagttttcccaaatagtacatgattttactatgcttaggtgatgttgataggtagttgttagcaaggccacaaatggaggtctagcaaaggaagttttggtaaggatttgctcgtttttctagtttgaatgactaatgttagaaactccacgtttgaacctgctggcatttctaggagcccatttgccccgtccagcttgttggcttgctgctgcaccacagctactgactgaatgtttacatgtaagaggagtggattcgttaaattaaaagttttggggggccatatctgtatttacacttttattatggcctttagagagttaattacttctactgttagacatattcttaatctattgttaaaatgtcttggggcatccatgcacccaaactaatagggagaatagtagaaccagtcatattcataacagtgtttcccgaggacaatgatcatatgcattttccctcaatgaaaaacaagatagtgaagccagtaagttaccagtatgtcagtatcaaattacttgcccaatcattaacgagtagtaaaaatgaaaagaaatcataaagttcacctcatgattcaaaggtttccacaaaaggtcagatctagcagtcactgccatttgaccgatgcacacaaccagtaggtcatcaacttccttcacacttagtatatttatgctgtcatccaacagagctggtggatctacaacaagttgtgaaacaatgggtctcaacaacatctgcagcaagcatgacataacagtcagtgagagaatatagcaagcaactatattactgaaggaagctgaaagacttaggaatattttattcctcaatggaatgagaaaacatgcaaagtatttttaaatggaaaggaaaaattcccaattaatgcataacctttaaaaaattccactctaggtggaaaaaaagtcttctaaagaattttttcataaccatttcaaatggtaaaaatagatattgatgcccatgcgatacatatatcagatatgaaaagtatctgacatgactgcaattattctaaaaatgtataggataggataggtataagatataaatctagacatgtaaaaaaaattctgcaaattcaaattaaaagcatacttcctgcacattatttaaaaagtataaatcatcgtaaatcaagtcctattaatctaccaacaaaatagtatcaatctcattacttttttgagatcatccataaagaggatagtttccattttggtgcatcaatggacaatgcttcaatttttatacatgcttctatgtctcaatatgtaaactatattagattttcatatctttaaaaaggcttgatgcttcacagacgcgtatcagtgaagtattcaaaagttatggtatcggatacgaatagatgaaaaaatgagttcttagtatgtaaacaattcacttgcctggaaatttgaggagtcaagaaacttcaaggtcccagtgtcgtacaagaaacacttatgtaaggatgacaagactagagccctgagatgccagcccttgatagacacactgcctatttcttttatattgccatcatctagaatcctggcctttttcttccgattcactctagacacttccacatctccaccatcgctaagatgatgaacacaactaccaagcaagtgtttgaagtagggaacaaacaatgacctacaaataaggatatagaccatcttaaactgctgtgatttgatcattattttgggtaaacaaggtaacatcataacaagtgattatattcttatgtttattggcataaacataaaaaataattaaggaaatcaaattgaaaactaactactgatttaaatactgcgaccaaattgtacaagtctcaactgtcacaagtggttgacatatttacagtggttcaaaacccaattttcgtatctacatcacatgtacataatttaatacaaacaaaaagctaaactcttcttctgagaatacaaaatatacccaaaatatttagaaacccaaataaagtgttgtttgactaaattcaaagcatgcttatttcaaagaacattttctaaagcgaacaataactagctaactaaatactgacttaccgatggctctcagtaagcttatttaccatgccatagaatgatatggccctatcaatgcttccgctggatgcagtttcatccacttcagattctgcccactcaatactctttatcagaagaggcttgaacatgctctcagtaagttttaaggttagaacagtcattgtgttaagcacacctttttccactacatcaatgttttgaactgaaggaggactttgacggcgcagatcaagagcaaccaaacaatggtcaaatatctttccatggaatgccacaatagatgatctgtccattgtaccaattatggttcccaacatatcaaatacaattgttaagcttttatccccagcctcaatggcagctgggtataattttaacaaaggtggcagggcaagtcgaacctgtaaaaaaatagtgattggtaaagaaaaaaatgggtatttcatttcataccacaattacacaatgctacattataacaagtcttacaggaattttttcagcaagaagctttcgtactccatgagctctagactccacctttacatccattcctgaaacacattcaggataaagcaccagaagctccattatatttgtaagatacggatttaaaaatccaccaagcttgtccacaactgcctccaaagtgatgagaacataaaaatgggattcatttaaggctgataaaacatcggtggtttcgggtttcatatccaaactagccaatacttgacgagatgacttcatcacattgtccataatcttgggaagttctgccagtgattttggacctagaacattgatcagggcagcagttgttctgaggcagctagaagtcacagccaagttatgagatgcaatatgtcttgtaacagatccaaggcacagactaaagatggaattattcgaaggaaatctttcagctagaacttctaatgctgaaactgctgccactttcaaggaggtatttgatgaatcatcaagtactcgaataatttctaaacacaatttattaagtgattcttgagaagtttcactcatatgaagcaaaagaaaacttggagttgaccttgaacctttattgtctttaagctttaaactgacatttttatgatttcttgcagcctcacataacagcccaagagcctgcagcacaagaaatacaaatatcaaatcacagttctcactgtcttgctttcacaccacaaaaaagatgtggatttctataccgtgctcatggtgtgcaaacattggaagactcttatgtttttcgatatatcaatactttcttttctattaaaaacttggggcgtttacttgcacttctattgtctgttttctttagtcacaaaaatgtcaccttgttttcaatttgtttccgattgtcaaatcaggaaatggagggggaaaaaagtttttagcgcttcctatacaaataaatgtaaacaggaaacagattgaaaacaaggtggtatttttgtaattaaaaagtgaaaacagaaaatgaaaacaggaaacaaaagtgcaagtaatcacccccttagtatttttggcttcttattgtgcgctcatgctcacatattaaaaggcaaataaataatttaccaagatgtgtggtcaataccaactaaacaatttacagtgtatatagaaccaactgtattcataacatgtgaataaaacccaatcatcatatgaaaaaagaataaatgaccactgtgtatacagtatacccaccaaattaagtaaacatcttgaaaatcaggatgtttaatagaatactatgaagcagataaatacaccaccaaattgtagtttaccactttacccttgtatcaaaataatacaagatcctaataaaatctcatattttgtaacttcattaaaaaccataccttttttccaacattcttgtctgcatggcgaagcaatttaattatgctctcaaagtatatgacaggtatcataactgttgttagattccttgcaagtgcatgcatagtttctttcaactctgtcctcagaattacagggaaattcagttgctttttccttgcatctacaagttgcatgagtaaaacaacatgctccataagcgcacccaatgccctctgaaatattcaagaagcgatcacatttatttttattatgaatatgttcatctaaataaacaagagaatataggcttattcaaagattagaacatttgcaaaacaaaaaaaaaatataagcatgcaacacttatgccattgctatcacaataagaaaccaaaaacagcatctcaacattaaacctacaaagaaaaaacaaaatatgacatattctacaaagaatatttcagttcaggttttgataatgaatattgttggatagttgtctaaattccagtcacacctagccttagttgtggcctctttgggggttgccttaattgcaacctcaagggtggtaatttagtcccacatcaactagacatgtggttaaatagaacttatcaagcttgggcagtcctcaccttgcaagccagtttggtcgggttgaattagggccctaagtccaatttctgataaatatgttcatctaaaaaaaaacaagtgtttataggcttattcaaagatcaaaacattaacacaaatataagaagcatgcaacatcaatgccattgcactcacactaaaaccaaagacagcatctcagcatgaaacctacaaagaaaaggaaaacaaatatgatataaattcttctacaaagaatgaatatttcagttcataatatgaaatctgcttctgcttcgatatcttcgtaagatctgtccctcaccttaaaatcacaatttctgattgatagaaatttaacttcatcatgtgtatcatactattttgtcaggcaaattacattgacaccccttaaacttacattcaatatttttttttaccccacacatacctccttcaattaataaatcagggaagatatatgttaatgataggatccaattgcaggctatgggaatcaagttgtacattagaagtatgcaattctagcgaggtttataaggcctcgggctctctaactaagtacaacggctagcttttgtggtgttgctctcccaaagttcttatcaattggtatcaaagctttccaccatgtcccttagcctgcacacaagcagcaagggtggtgacgccacattgcagccagtgggtgtcaacatagtatccccaaatttatgagttaagagatatcaacatctcaaaaacatactgtatgtatctgctagtcattattgggcatgggtcaggcaaaaatagaagctattcataaaaatcataatataagttacatctagactttgccttatagaactgaataaagacattaaaaagcatacaagtatctagcatgcatctgatatggatttatacctgaatgactgaggtatcttcacctgatttcaacttaaacacaaattctggatcttgcaacttttgcaaagaaaattgcattacaataaacaattccagaaacattgcctggtcaacatcactatttcccctctgttcaagcagtatgactaaagaaggaagccaaatcgtacttgtatattgttcacaaatttgcactgcaaatttatattcccactcctcattataaaatgttaaaacatcttgcatctcaacattaaggaaacaggcagctttccttgaaattaatgaacggaaaagtaggataagcaatgaggctaagcttttaccctcacccaaagttctgcaaaacagccatcattataagacacaggcaaaaaaccgatggctgaagtatcaatagcaggatcatgatgtagaagtagaacaagaataccttaatagatataacacaaatgacagccttctgtgctcaacaatttcaggcaatatattcatgaaaatctggaggaaaaaaaaacatattagtaggttgaactgctaagagattcttttgtatcaagcagcagaagatcatttatgtgaaaaacaaaccttcagtaatttctccacatcatctgtcttagccagccaacacggaacaattgcagatataagatcctcaaaaacatgcttcgaatgactgtcaatctacaggcacacaaaaaagagaaatgatgacaccacagttcctacactggattattagtccctaataaattgaattgtgaagaatttctattaaatactgcaactaaaagttaagttgcaacagttaataagtaaggtcatccaacaattgaggtaggtgatgtaggattttccagtttccacaccccctccccttccacagatgcctgctgaccaagtgatgcacaaaggaaactcggaaatgacagaaatggctggaggctttgataccatgttagatttcatcttaaaactaattggcattaagtgaggttgtccgacaagtataaaaaccacgccctagtaatcgaggtaggagttgtggaactttccaacaagcatggaaacataagaaaaggatgtaataagctattctacacaaataacattgttccccagggaagaaaaggatctaataagctactctaccaaaagaatgccctaagttcagtacagggaaaccctgtattaacaaacctgtgtgacagctgcttgtccaataacttctagaatatcaagcatatgctccaaaacttctcctggaaagactctggtaacagcagagagaacagaaaatacatggttgcgggtgactgcaactgtggaattccgggcgcactctatcaatagcttaatgttaatttcatttgtcattttttcctgtcaacaatggcaaaacttaataatataaggaaatagctaaaatagtgaaaaggtagtcaaaataatatttctaacaacataataaattttccagcttcacaaggcatacatttaacggatccatgcttttaagagaaataattatatcctccaggattatcaacagagtctgttgaatatgatatattgtgtaattgttggcttccgaaggacttgaaggttggcttaactttatcttcggggaaaaggcaccattcacccattcttctgaaaataccttgctaagaagcttaaataagggccctaaaagtaaatgcctgcaacaatcaaactgagaatttagcacagttaaatgttttaactactcatctcagcagtacccataatgtaatgttcagattcagaagtaaccaagtcacctgtttgttatgtccttcttcagtagcaaaacatcaagaagggaactaaggatgtagactgcattaactcttctgaatatgtcattaggaggatatcctgcttcttgatgtcctatgaatttttgtttcttcaccatcttttcttctgctgaactacttatacaactcttctgtgcaagtataagatcaagcatgtggccaacagttgagaaactaatctgcaattccaatatatccaccaattattcttaatttcatttcttttttttccttccgtggaataaaaagttggaaaaaacctcccatacaatgaaaagaaacaacaacaaattcttaccccacaaggtgagattggacattgaagagcatagtgcaaaacaaacaacaaataacattgatagtgcaaaacaaccagttgatccaaaaaggcttcggtcagataacaatggaatttacattgttaaaatttatcctcaggtcactaccatattaactgtttaaggatttttaaaagaaaacatttatcttatcatttaaaaaaatctacaatcaattgatgaataatgacatatcatccattttgtcaattgatgaatttgaagctaaacacccagcagataatgatgaaacacctgtttcacagtgaaatctgctatcaaataaaaagcaaggaacagaacagaacagtgacacagataacggaggatagaacacaaggctgccaagttcaacagccagaaaccatcacggtctgattgggaatagatggaaatactgccatagaaagagagaggccatgatttgtccagaatcagagagcacaaagctaaaactacggagctcattaaccacagtaaaggggaaaaggatccaagatccacaaccccaccccccggaaaaagaaataaaataaaataaacacccttcttaaagggatgaaaaccccaaaggtccagattgaaaccaaaagattaagttctttgcaagtaaccactaaagaaatcgcacacagaacacatgatatttgatcaagagcaaggaactcacatctatgcacattaatgcctctttagttgcacgttgtacatcaccattatcattatgccacaaaatcacgagctcacaaaatagatgctcctgacaggcataagaaaaaactattagtttaggtcacagtaaaagctacattggtgataattattttatttacacaatgaaacagattatcataaactcattaactagatcattagctatactcatcaattatcatgaatgacaacaacaaactctgaaaataaatagatatactgccaataagaccttcacttcattcttcaacttcatatagaattgattgttaagtttgttcaagacagtgatacaaggctttacacaggcagggtcatctgatgtcatgccgcccaactgaaagatcccaagaatgaagtcagtaaattcaaaataacaagacatgacataagtaaaacacacatcttaatatcttacccgcaaagctttcagtaaaagatgttgaagatcatttccaccagagggagatgacataacacagctctacgcatgaagaagaacaagttcacatcaaacctcataataaagatcccataagctaaaactaaaatatacaatacacatacctccagcaaaaggcacattatctgagtttcagtgtttgacaactttggacaagacttattgagctcattatagtactgctccagaaaagaagacaacaacggcccaacttctggaacgtgcataagggcattcccaattcctttgaataaggataaaatcattagctgcatccaacatcaacaaataagttacttccttaaagtctcggcatagcacaaaaaaccctcacttaacactgttaatctggaactgaacatatgaaaccttgatctgtatctctatctccacaactaaaaatataatagaaacatagaagagcgttaagacatcaaaccttcccatagttagagaatttaagagtggaacccaaaatgaagccaagaatttttatttttgtaggctggtcaaacctgaaaagatatgtttgggaacaaagtggaataaagaatcttagaaattagtacaaatgaacatttttaatgaatgaagataaggaacattcttgaaaaaaataaaaacagaaactaacaagcaaaatgaaaaggtaaaagtaatatggggaaagttacaagataagactcacagatatatgcatcaaacaatgagcgtaagtatcagaaccaataacaacagaatattctaaacctattctatcccaacaatcaatctcaataacacaaaacagcagcttaaagtccactaaaaaggtaagccgcacaacacgtaacattaaacaaacaaaaacactaaagcttatatgtaaagaaaataaaacaatgttaaagtctatatgtgactgtacatgatgtgtcaaattttatattgccaccaaatcctacctttcattatcctttaatgctttcatggtgacccaaaaggatcgcttcgggacgcttatgagattctagtttataatgtcatattttcatttaattaatggtcgctggcttctttgattgtagagagtctctactagagacttgtctttatgtatggtacataaagcaactttgcctgcttgaactttcttaggaagagagtatatttacaattagtatttttgcaatgactccattcatggctatatcttcatagcccaaaaggaaacactagccaagaactcttatcacaatctcgtcagcactcagcaaggaaaaaagaatcaaaagcaataaaaatacaaaggccgggcccatgtagcaggaagagaaaacagttaatcaagtgattggttcagtgaatcaatcctggccttttttagattaaaggagaaggaaggaatagggtttgatgttatataaaatttgacacttaatgtcaattggtcatataatagagacacatacacatgcacactaaagcctaaggatgcaatttaataaaatactccaaactagtgtcatattgcttagtttggaatttatcataatttcttgtttcaagtttatcgaagaattcatctagaggaaataaataaggacaagaagaagataagcaatcattctagaacaaccataataaagaagtagaacaacacaatagataaaaacagctctcaagtgaaaacccataattacaaaatttataagcaatataattgattagcatttgtactaagttaggattttgaataaacaggttttgaataaaaataggatcattcaactgtcaagttaaggttccatcctacagtttatgcattggttcagtaccattttaattctcagctgtttataatatatatgtatatatatatatatatatagtcacatttaacattgaatgaacctcctagagaaccctctatgccatctacctaaatttccatttctttctcctcccacccttaaatttactttccccttccctgtatgactttatttgtgtcatgcatccctccaatccttatgaactttgagttgttacaatggggacaatgaacagcaacagaaccatcatttcccgtgacaaagggaaatttactgtcagttgtcaaacattatatcatttagattttaaaaagaaaaggggaatgctgctctccacatttaagaagatctagctaattccaacaacagaacaagagagcatggtcatatttgatgagcagcagctaaggcaatgaatataacaaatagttctaaggtaataatattggtgacaatgaaatgataattgtcatagtaacatcataaataccttttttctatattttgaggtaccaagatatttcgaggctccaagatgtttggacaggatgagctcatagcagacgcaaacaatgagggaagaaatttcttgtcagacaatatgaatgttttttgctgatccatcaacgccaaaacatcacccacaaaatggatccacattgcattgttacctgttcatatcaatttagaaacttataaagttccaaggtaaaattaattaggcattgagggctacatcaaattattctgacaatggagtaccatttttctttccagaacgctcaacatgacaccacaatgtacgcaatgaatcgatacagttcaaggcagcaacccttatagtctggaagaaaattcaaaacgatgcaaagaaatcatttgagcacattttctcagaaagaaaaaagccaaaaaagtaacagaggataaccatttgtcaacaattataaattggcagtttgcagaaaatgagaaaaaatacacacaaggtcagagagtaacgctaacaaagaatcatacctgattatcactcgccaatggaacaagaacagaaggaaattcagctaaaagttcaatttgccatttatcttgtgacaggctacaaagaaatgcatagcattgaagactttcaacctggactgcagcaggaacacctgcagaatgaaagattcaaccaaaaaatatcaaatatgccaattgaattttatctgacttctgattcataaaatgttaaaaatatcaattcaaacaaccatgatttcaatcaactccctccccctcccccccccccccccccccaaaaaaaaaaaaactataacttaattgcatttgcatagatggacgaaacaaactggagttgggcttatatgtagtaatgcaaaaaatattattgctttagactggagtcagacatacatagatatacacaagctcttttgacgtgagataaacctcactgactcgaccgatatcttgatctgctttggagagaaaatgtgatggaataagttcttctcatccaagtgaacagaaatcatgtccaagaaagtatcaaaggagcagatgcaaggatcaaaggagtttttggtggaggtgctttcagatttaggataatatcttagcttttaaatgaatttgaaggggaaaccattgatgaacaccaaaatacagcgtttgataccaagttagattttaagaaccaaagagaaagttggcaagagagatttgagagaaaaagattgttctagatctgaaatcaaaacatattcaaaagtgtatcacctctgaatctgttacaatagagtgaacccataactgtctctaactaaaaactggcagcttacttctgactgaatacaagtcaaacaagtaggatacagaaagcctaacacaaaacagccactttaacacctaaacatggattggtcaggatgaaaatgcccctaacgggggatggaaggatttatcagggatatacaaaataattgaaaatggagtaaaaagaataggaaaaggagaaagaatggaaatagaaagagaataactacaaatataaattttgtaccttctaaacagcaaatatgtgtgtctgcgtgtattcattattatgcatgagagatcatgataattacagaaaaaatagttctattctctccctttgaaatacgaacattttaggagaatagagctcctttaatgattatttttccaagtatcctagatacttggtatagtcaggatcaatgcatcttaggaagtagtggcatctaaattgttctcttgttaaattgtttcggcattgattatctttgcaatattgttgaatataaacagttcactctactgggtagaaaatacaatcaagtacattcagaaaattttctttctcattttctacaccataacacaggcagtaatttcacagtagaaggaacacaacattggccaagtaaaatatgggaaaaatcaaacaaaaggaataagtgtatagcaccttcttctgtgaaaaacttagataagaggcggggaggtgatattctgcactgcgctgctaagtaatggaggtgttcatggaatgcatgcttcaatttagatgaagcaaaaaatacaaacagatcccttatcttgctgacccacttatcatcgtcatgctgcattttgaaaaaggttaatatccaaccaatgttgacggtgagagtctaacaacaacaaattccaagaaggaaagcaagttcataagacaatagataacaggattacaaatagtaaaggaattacttacaagcagaatgtcagaagttagtactgatattagttgtgctagcctccaaaatatgcaaatcataagcttcacattaagatggctcagcttgacatacaaaagatcattaaagaatgcactgcaatcccagtctaacacttcagacttgaactgcaaaacaacccgaattcccaacaatcaaaacagaagtaaaacattagcttctcattacaaaaaaagtaaacaaataatgaaataaaagcacaaatatgctagtaaatcctttgtacctcatccaatgagacatcaccagctgtcactgacgtttcccactcagcctttagaataggaaatacacattcaaatagtgcacaaatgtcttcatctttgatcaaaaggaaaaagtcaatatttatcattccttagtcccctcttgaaattttttggctaagaaatctaatagagaagacaaaagtacaactatgggatgtataagatatgcttcaaacatttatttctagcttatttgttcaaacattacttgtttttagtcattatacgatataagattattaactatttctgaaaaatattaaaatggaattcaaaaagagaaggggaaaacaaaccttttggttttatcaaaagagactgcaaaagaacaaaaaagaagagtgtctttgacaactccaaatcactgcagctttcaacaaaccaagctatatgctctttgggatggaccatgaaattcttagccatgttatcaatagtcttcaagttaattgaagataaacttccaggtatcaatgtctgcgattttacttcaagagtcactaaagtaaaagatgattgacaatttcatctgacataaacatattcatgaattgttgtgattactgattaacaacttagaaatatgatgaaaccaaaaatatctttttagaaaacccacactacaagtactactagtaagtagtaacatatcatgttcatgtactagactattcatggtgcaattgggttattccctacataatatctgtaaaaaatgtgcatttcaaatttcaaagttttggttttccaaaggagacaggacctaatgcttgattcatatcttcagttcaccttggaaaattctttataggatcttcagtttgacaaatttgccttgttgagcaacagaattaaatttcttcatattgtaagtgtacgttaaatttatagcaaactaattccaaagtagatatttaccccttctccaaaagaagatacaacaatattctgataaagtggccagtttattttgttgacaagtcccaaagcctttaaattcaagctctgtgtctgcgcatggcaaaataagttattatttgataattacccagagacgggaaaatctaaaagctattaaataagtacaagatcaaaatatattaattttctatccgaaaaacaaatattaaatatgatgttaaccactacctgtggtagaacaaggagtaatggaaaaatcatagcagcaacattcttcaagtaatcagcatgatcactgaagtaggagatggcattctttagacaagtgacagcaacttcaacatttagactatagttatcagctgaacctacaagaagagaatgggtgcataatacatgcagtgaattaagagcataatttttttttattcagttatgtaatcctcccacccaatcttgggatagatgcatcatcgttgaatgaatcattagtaaggaaccaagcaaagaccatttgtttaaagaatatctaaatacaaacatctctgggaagccaaattcatccttatccatggttacaacagaactgaaataagtttacttgtcaaagacaggaaacaactagccataacttaatgaggacaaatatactccagtaacagaagcacaactggaataagtgtatgaaatgaaggttatatgcttatatgtatctagtcaacataaagtaaaagcatattttgataaaataaacataaaaatggacaaccagacacccttcaaaaagaaaagggaaataatataagttcaatagagtaaatcaatcccaaaatacacagaagaataagcataagcatattttgaaccattggaaacacattaaggaagcttagacatttatgagaccacatctgtattctgcacgtaaccccaccatcccctaacagtcatcaatcatcatccatcaagaatgcattcaaagaacaaattccttttcccagtttatggataaatcgatgcatggtatgtattgcttcaatacaacatgcagaaacaataaagatgatatctatctaattatttttaatataccacaaattacctgacagcagtttgccagtgcatctttttagcacattctgtagtgcatcaagaagcttagaagaatctattacatttcgcaagccatcaacacgtaaagctgcttgaacaactgttagatctttatcatcaagctgtcttaagatgtcctcttggatgcttacaagattctgataaaaaagatgacttttggggttagctaaaggttgaagactttgaatatggaaaaacagtattaacacatcctagcaagaactttgaccatattataaagatttccctaagtcaacatgaaatcaacccataatttcacataaaaacagcataacccacgtgataatcaattaatttatggcttataaatataattaattatagcataccaagtactaaataatggtaccattggtactgagtacttcttactagcaattggtgtttgtgtttgacaatgaagcatgatgcaataaatttttatagcattttccaccaccacactttcttttggacagatttgtgcccttgagttcatcgtggttcaaggctcagtttacagaggggtttcacttttgcattttgacagtgttgtaaagatatcaggtttaatattgagttctgtggtcttcactttttgctaagcctttattacctggctcggttcaaatgaagttgaggtggcttttgagggatatatactcctccctccttgtacacctactctttcaaatgaagttttctaacaaaaatcaattataccctccctcaccaacaatgtgtaaaatcagtggccttgacaaattagatcacaaatgcatctcagttcaaatcattcaaaatggaacttaaatgtatcaaaaaatatttccaaataaaactagtttgacagcaaaattttgtaatgcaaccatttcctaaaaataaaaataaaaaatcaaagagaagtaatatgccaccaccatcagaaattacacacacttaaagaggaattaatttacaccgttgtaaatcacacttactcttacatcattatgaaatgtaatttttgccaactattgaattataattatatattaccaaaattatctatgtcaaatcttctaaaatatgaacaacaataagaagaaaatcgaatgggtttgattttatatgtcagaagtatatataacattaattttgaagaactgaatgatgtataaaaaaaattgaattaatctaaaattctgtagatatgataggaacttttaatccaacaatgggtaacgagataaatttatccaataaaaagttactgaatgatgtaagtgttggtaccaagcaatcacacaacaatcgagagagcggaaagagaagaaaaggaagaagaaaataacacgtagtgtttacgctggttcacccaatgtgggctacgtccaactattctctatattttcctcacacactcgttacaatgtactcagattacaaggaaatatataggtttagggtccctaagcatagtagctattcatgggtccaagcccaaactacaaataataaaactcaaggtcaacatcagaaaacaatccctcattgtgtgtgtgtgcaaaacagaaaacacatcaagcaaaattttaatagttctgccacccaaaaagagaaacatcaaggctgttcttcaaccagtgtcataaatgaaaaatacaaatttcaaacatgcagttttgggaggacagatatataaaggaaataaaccacatcaagcaagaagtttcaacttttttccaaccaaaaggagcacatcaaagatgttcttcaaacattgtcataaacaaaaaatacaaattaatggaaacatgaggttttgggaggacgagaagattaacagagcatatatacctctgaaccaactgccttggttttcaggataacggaattatttaaatcaagcagcgtagcacgtcgaacatcagcctagaccaccatatcaaatataaatcatgaagctcttacaattataaaaaaattatcattgttgaacaggagaatacatacttttatatttacatacacctaataatcaagaataggtcaacgattgatacctttggatgatacaggcccaaccaaatatttgagtctgaaataccaagtgacgaatccatactcccatccaacatcttacataaaaccttatacaatgaatcatctttcttagaatgtcctttattatcctgttgaacatgttcaaagttcaagccattatatactatctgacaatgcatgacaacaacaaaaaagcagacaactcatcagcatacctgaaggaaatgatgagcagcacctcgtaattcagaagggtattttgtattgacaacaaacagaatcttttttgcccacccaactaatcaacatttggcaaaccaacattatgagaataataagctaggcaacaaatgataactgactagttgtagatttctagtaaaaaagataaaggtaaaccatatggagctaaatgattaaaaaaaaaaaaacaccataagaaaagaaaacaaaattattcaggagcaaaacctgacaataataatttacacagaaatcaacgaaacttcttcaaaagaaatttgaatttccaagctgaagcaagtaaaacaaagtacactgactaatgaagacataacatgcatgcatgatacacatagacaaatcataagccatatagtgagatacacaatttgaagatatctagttcattagagggtttgtttacaacacaccaaatttgttttaaatcacttattcaactgctttaaagcagtttcacactcaaacttggccaaaacagagttggtatcaacaaggattgttagcagcattaatgtataggacagtagtatgtgcaatttcctgtcttcataagtatctttcatggtctctgggtttctttataaatctatttatttacagttgaaaaaaaagagtatgtagtttcttaacaaataaaacttcccttcctgaaggcacacattagacttcaacatcaaattccaattttcttttatcagtttcaacacagggttaaactgttaaagaatggagtaagattctttgaaaacaaggcattgtaaccagcgtaatccaagagtttggctcttaattgagaaatgcttttcatactgtagaaatggagagtgatgacagcatttggtataatgcaatgcttttgttctggtgtttcaaacaccagttcttactatttatacagtctggacaaacattttattacttacataatattgatatagaaaacaaattaactgctaagtaaaccacttttaatatcatgtatctattgcatgtttgaaaagttctgtgtcggggggaataatttccagataagctgccaaaaaaatttcttcgcctccaaaataagcttatacaaacacaaagtaagatcttcatggtgaaagaaatttccaagtaacttaaaatgcatccatggtcattgctttcagaattcagaagaacattttcacacaggtattcaaacaatttttttacagaagtttagatgagatttctcaatcaccaaatgagattttcattaaatattattttcttcagaaatttattgattcactcttggtatgaattattagatcaaccttatgaagcacaccaggatatataatttggggtacaggatagtgatcagcattctaaaattcaaaatcagaatacacacctgacatggaagaagttgagtcgctaactttttgtgataatttcacacaatttgaaaggatcttggtgaccacatgataaacaagaccatgtacggggactttttctattaaggatagcaaagtccgctgacagtattcatctgaagaactgcaaatgtgttattgttataatcagcataaaacacaagcttctataagatatgacttaaagcatatatctcctgaaagacaatcataggaaacacacctgcagtcaatcagggagtccaaaagcacgaggagaaacttttcgatattgaactccttagataattctaataaaacccctgccaggtccctatatgaaaagggatttaataaatcataaatataaataaagaaaaggcaacagtcaaagcacagtgattatgcatatgatgagaagttcgaggaagactaccttatttcctttaatatctccaaggccttcaatgggagtatttcaacattttgagactaagaaaattccaacagaacaaattaaaataaaaatatagccattcagaaatagatattgcacaatgaaaggaaattggatgaaataccaattacaccacccccccccccaacaaaaaaaaggattaatgcctccgtttaaaccatacacaagcacacaggattacactagtacctgaacaagactaattaaggtaataagggacaaccgaaaccaatggagatctgtcaactctgtagcctcctgacgagcaacctcggcaaccaaacgtatcaaactattcaaaagtttaggagctaatgcagttttgtttccaagcaaaccaatgatcataagagaaccagcctgcaaatagaaaaccaaaaaagaaagcacaagaaagtgagcttccagctgctaattgtaaataaggacaatttgacaacaaaaaaaatgcaggagagggagccaagaaacatagctcaaatacacaagtatacatatattgttggaatatgtgaaaatattttatcatatgttagagtatcttagattatgttttaggattagtcttcctatacttccattatctctcaggattgctctatgattaacataaataagagttagtacttcggatttcatgaatataccatccaagacatggcaattcatcgtaataatcagttttttttttttgatcagcaaaagtatatattatatatatgagaaaaaaggatagatacaaaaagaaagcagaaaacagtccatgataacaaaacccagcctatggcacactaatacatagaaaacatgaattaaggtgccataaacaggatggacctaaaaccccccagacaggtgagagagattaaacagtcccctgcttacaaaaaatatccctaaggttgcaagcccaaacgtggaaaggcatgtgaaagcctttctccaaatttttgcaccacaaccaacataaaaagtaaggtcaaataatcagtagaatatcattcaaagcttctattctcttctttaactccctctatacctaaaaccccataatttcaacagatcaaataagcactaaaagtaaggtcacccagtcatataatcatattttatgactatactaacataaaaaattatgcactactattcctatctgtgatgaataatattacactggtggatattgtagagcaaaagagcaaatttatttcgcagtctaccatttgatagcaattacattgcctactaatgagaaggtaatcacaaaaatatgacagtatgatacccaactataatcagttttaaaatttaatacatggaaaataatttcctaggaagctaaccttgtgatctgaaacccccttaatgccaggctgaagactcacaaagggaagtatcctctttacaagatcatcatcaacagtcacaacagtacccaaaacttcaacgaaaacagcagtacaaaagcgaattgcaggcattgaaggtcgagacttttttgacggagatgcctgtaaccaaatccttagccatataattatttgattccactagagaacttccacattcacaactaaacgcaaaacaattactcacatagttgcatagagcgtctaatatgcccttatcacggatgcactgctgcactatgaccattctaggcagccgtgcaccagaggctttcacaccatcaagaaacccccatttagtattccttcacataaattaacagaaacatcagaagcctctccaaccagtagtagtctacatcacaaccaaaccaaaaacacataataatatcttcctaaccttgtatcaagtatctgtactattcgaacaaattcaggctcgtcgtggtacggcaaagcacacaaaatcaaatcctcgttgttgtatacatgaatcctgaaactcaaaacaaccacatcaaaaatcacaaaaaaggtaaactaggcagaggcaaaatgtgattatcaacacaacacccctaggaagaaaacaattcataatacattgttgaaagctcacttgtgtctacgtatcaagtactcaagcgtttgaagggcggccgtatgaagaaaatatccagaaagtagtttcaagtatgaagcaatggagacattaagttgattgttctgttctattcccatcaactctctatccaactctatacgcctgtggttaaacaaatcgttcttatggttcctgaaccgctcatccatgccaataagaatctctaagcctgaaatattgcatcacataagaaaaacagaacaaaatcaaacgaaaatagaatataaagtagcaccgtaattcatatgtattaagaaaaacccaagtccgacgttgtctagagatagtgtcaagatagagtatataagtgggggataatcctcaccctatgagctagcttttggggtagggttgagttaggtccaaacccatattctaagaatatgctccatgttaatcactgagaaattaattcggtttactggattgctttagttgcactagctatgttgaaaagagcgaaattaaaaatgagaagattgacctcgaagagcttcggtgaaaatagcctcggtggagatgtcagccgcttttttgggatcatacaagatggaagggcgagtgagtggcctcttgagagggtcagagtcggttttggcgaaggatctgatagcttctaattgcgacgctatggaggacgccattgctagggtttcgtaccaaaacgaagcttaaacgtttgattttggtttcagttttggttcttctgcttatgcttcttcttgctgtctgcagaacttaaaagtcaagagtgtgagagaaccaactgttatattgatttacggctttcgcgctgagctgctggtagggtttagggtttttgtgtttaccaaccattaatgtcccttcctaaacgacgtagttcctctctctaataaataacaggctgaataatggtccactttaatcaatatttttatttaaatataaataaatagttaattttttatttgttcttttatttatttatatgttatttaatttaattataaaattttattgaaatataaatataggtagaagtctcaaatcgaataaatataaaaaagttaaacattatataaataaaaaaaatacttataaatgtgagttttaaaattttaaattaagatatgatattaaatttatttatataatttttaataattcattagtataaatttttttatgtttatcagacacaaaataattaaaattttatctcatactctaataattttatttttaaatataattacaatctattattaagtaatctgtatcctatgatttgaaaaatatattagagatatataaaatttataataatttatctttaaaatatataagtaattggttgtgcaacaaactcgtaaaataaagggagaaaaaataaattttgaatttaagaagaaaaaaaatgaaagacatggaattttgaaagaaaaaaaatcttaaaatcattttgtcttatgctttttctcatttttttttaaatattgcttctattttttctttttattttttatctcttactctttaaacaagcatacaatttgagtaaataattagcaaattaactaaattcgtatttttctaaaatgtaagttcatatctttaaccaaatatacagttagacaaacttcaccaaaatatattaaacatacaaagcgatattgtttaattcatcaaagaattgtgtatattagaaaattgggttttctaatgttgagttaaatataatggaaataaaatttgagtcaatggacccaatactatatattaaaaggacaagactctacctttgtccagcataggtgcacatggataatttatgcgcacacccacatgattaagtttgaaactctcaacagtgaggagattgttcgtaatgttattgatagtgatttattgggatggatttggacatttttatgtttgtaaccttcattaataatttttataacttataaaaaagccttatatagtattaaaaaaaatacagtttttttatgaatttttcagcataaatttggataattttataagatttttttagtataacactcaacaaattattacactaaactcttgagattttctaatatttttttctttttttattgttgatcaggcttttcttttatttaatcacacataatatatttttcttttcgttaaaaatgatatacacattcataaatttcttcataaaaaacgtcattatgataatgaattttcaattgaattaacatatgattcattattttcagtattatcaattaacaaatatcataaatttaaatttttggttcaaatccaattgcataaacaagaagattttaatacagataggcttaataaattatgtgaagaaacattaaatgggaagacagaataaattaactattaatataatggaaattttatattggttacactcttttttatctaaacagtaacattttttttattgaccctaataacctataatgttttctaaaaattcagtgaagttattaaaactttgtaaatctataaaatcttctcaaattttataaattaatatgttataaatcttttaaaattcaaactacaaagttttaatcataaaaatatttttacaaaatcttaaaattcactacattcatccaaagtcttgtaaaatccaaaaggtttattataccaaactaatattctaaaatcctaatttaatacctatgtagcaccgactccgacacgcgacacgtgacacgacacgactcgactctccgacacgtcaatcttaaaaaattattgatttcgacacgttgggacacattttaatattaaatcatatttttaatttatataatgtatatttcatttaatattcaataacttaacaaaaaaattaaactaaactaataatatcaaattattaggtattaaaaaaataaaaatagcacaaaaaaaggttacaagattcactggttcaatctcaaacatacgtcaaattaacaaattatcaagtattaaaaatataaaaaaagcacaagtcagatacaagattcagtttcaaacatacattaaattatcaagtattataaaaataaaaataacaatatatcaaagattcacagtgaaagaaatatatcaaagaaattaggggttcatagatagaattaaagaaattgggggttcaaataacacaagccatacacaaggtcacaagcaattaaaaaaatactgcagaatacataaatggtttttttaataaaaaaaacctaaaaagagaaaacctaaaaaatctaagctaatagcaattaaaacacaaccacatgtccacagtcaccttatctgtgtgaggcacgaacggcggagagaagagagggagagaaggagcgcgaacggcagaggaagagagggagagaaggagcgcaaacggcggaggaagagagggcgagaaggacgcgcgaacggcggagagaaggaggagcagcaccggtgacgcgaacggtggagagaaggaggcgcgaacaagaagggaacgagaaggaggcgcgaaaagggaacgagaagggaatgagaagagaggaacgagcagagcagtgtcggacacggtcaaattcgcgtgttggcgacggtcaacgagtcggagatgttgaccgcgtgtccgacaccatgtcggagcgtgtcggtgtgtgtcggcgtgtcgggtcgtgtccgacgcgattctgccggtgttttgccgtgtccgtgcttcatagtttaatacatctgcagtttttatgttgtatttcctcattttatttgtgttattaagtgattttgtttaaattaaactgaaataaatatatttgtatggtatagtatcatgttttttttaacattttttcttttagtattgagaaaattaattaaattaacaaatattatttatttatatttaaatgaacaatgaaaacaaaaaaaaaaaatattgatttcagattttaaaggaataaaactcatagaaaactaaaaatatattttaattgttaagaaaattatgaaagcgtggtttcgttttatctacgaaacaaagcggaaaaagtgaggcaacgacatatttggtgatgtcatgaggatgggtgatgatagaaacaaagattgaagcggaagtacattgttgtctcagccaggtagttactgttactgttatcatggaactcaaacaacaactgcttcttctgattctaacgcttctttttgctattgccacgcctgaatacgttcgatctcttcctcgtaaaaccttaaccatcccatgggattcaatttccaaggcccactcctcttaccctcaacaggtcaatcaaactctttttcattcatcatgttcatattcataaataaatagtactatatcatcacccactttgtgttatttatttcccacttgatcaactcacagtacctgatttctttcgtattttgattggattatgttgttcagttgggagggttcatttttttttttatagggtgatattttcaaaattattctctatttcaagttgttgactttaatttctacgtagaataaaaaaaatcatattgttaatcattcagaaatcgtctttgatatgatttttaagacagtgacgatgggagcatgtctccggggttcaagatatagccctgcacggtttctttggttatgaaattcaaagttgatccaataattttctgtcactcttgtattggatttatagttcatgatctgggttctagtcacaaatcttcaaaagacattttttattcgttatggttggtgatttcttatagtatatatctgtacagacaatgattattatttatcagctaatattatgtaacttgaacagtttgtttcgctttctatgaattatttgccaattctaggacaaatattctgtgaactgtcaaccgtgcttcctctattaagcaatcatatcagcctctttagttagtcttttatgcatgttcttttatggtgactattaaatttcagtttctttgataccaaatttttgttccaggtacacatttctttggcaggagacaagcacatgagagttacatggataaccgatgataaacattcaccttcatatgtagaatacggaacattgcctgggagatatgactcaatagctgaaggagagtacacttcttataactatctgttatacagctcgggaaagatacaccatgccgtaattggccctttggaagacaatactgtgtacttctaccgatgtggtggaaaaggtcccgagtttgagctcaaaactcctccagctcaatttccaattacttttgctgtggctggggatctgggtcaaactggttggactaaatcaacactggcacacatagaccaatgtaaatatgatgtctacctgctaccaggagacctttcatatgctgattgtatgcagcatctgtgggacaattttgggaaacttgtggagccgcttgcgagtacaaggccgtggatggtgacagagggaaaccatgaagaggagaacatactattcttaacggatgagtttgtgtcctataattccagatggaaaatgccatctgaggaaagtggatcaacttcaaatctctattattcatttgaagttgcaggtgttcacgttatcatgcttggctcctatgcagattatgatgtgtactctgaacaatacagatggctaaaggttagttgatctcacctattgatcaagagttactaaaaattggataagtgtaatccaatccatgaccatggaaaactacacaatcatgcttgttattattatttttatttgtcttttttacactactctatcattttaaaaagaaaagtactttggagtttggaccactttttttttcactctttaatttttactcatccctcatctacaggaagatctgtcaaaggtagataggaaaaggacaccttggctgcttgtgttatttcatgtgccatggtataatagtaacaaggctcatcaaggtgcaggggatgatatgatggcagcgatggagccattgctttatgctgccagtgttgatttagttatcgctggtcatgttcacgcttatgaacgttcagtatgtctttatgttttagcattttattttctctgtaagcaccatttagtagaaactgggttttaatactctatctcattgtcagaaacgtgtgtataatggaagattggatccctgtggtgctgtccatataactattggtgatggaggaaacagagaaggcttagctcataagtaagtttcacagccagaaacatcccacagaaatctgttttctgaatcctttattatgtgaaaaaaaaaaaaaaaaaaagctatattgaggtttatcatgtatgcagcctgaaatttgtttttccgtcattgttgctgcatgtatccttacataattgtttgttgacaggtatataaacccacagccaaagtggtcagaattccgtgaagccagttttggtcatggtgagctgaagattgtaaactccactcatgccttctggagttggcataggaatgatgatgatgaaccagtaaaagctgatgatatctggataacctctttggtcagttcaggatgcgttgatcagaagacacatgaactcagaattttgacgccctaaactcagaactacgtggattagcaaaagttatgtaaatattgatgattagacaagtccttagtttagtttgtatcactactagcagcagagtgagtaaactgaggtataaggctagttgtcactttgcaagtgatggtgttgcttgttttgtctgaacttataagattggtttctgatttctatatagaaaactaaaacttagcgtacttaataaccagcaataaacatgtatgttttatattcttgactgacattgagattttagattatgattctagagtcatgcaacgagtaaagccgtgaagattactgggattcacgaaggtctaattaacaaaatgccttaaatctgaaatcattgttcgctgataccagggaaatgggatatgatagaatgtaaatcagcaatctaagaatagaacggtaaaaacagcagagtggataattaagcattaagtggaaactactgggttggcctattctgtcttgaagtactgaaactgatttatccaatatacatcaacacatgaaatctgctaaatagaatctaattacatttatgccatcacagtgattttataaagtgtgaatacaaactgagttctaaacaaatatctgtatctggtgaatttaggcaggtaacatctttccccttcctcctctcttttaggttttgtttctccatgttgttttgttaacaattaactctatttcacatcatcatcatcatcatcatcaagtggttagaaaatgggtaactttggcactgtcagtttctgctgaggtttctgtaatcattaatggtccagcttggtgcttgcaacgtctcttggcttgaagttgaaatcagcaagcatgagcagccatgattctgtccaaaagttctcggggaacatgctctcccctactttcttgaggagagactctagcaatatgcaatccacataatgtcttccattcagtgtaaacatgtaggtcaggtcatatagcagtagtaacactacaaactgcaaaattgtcttgattctaaagacatcattcagtgcattgtccaatcttaaaaatataattgtgctaaaacatcgatacaaattcccaccctcttagcatagttcaatttcaaccagtaactgattgctttatctcagactgctcctgtccttgttcagcagatgtggcacagcaataatctgttaagtttcaataaactcattggagtggagttctccatgcatatcattatacagataatccactgggattcccatgttgtgttttgcatgcagggaaaggatatggaggcaaaaaaaactcttacaagtttcatggttcataacttattgccaatagattctattttgggttgaagcaacttcttcgagttgttcaatcaaaagaagaaaggacctcaacaggaaaagtgtttgctcagtctctcctctttacagcgtctctgatctccaaccatggactcaaaagtatccaagagaccatccaaaccctcatgattcaactccccaactgccttcaaggcaaatacaatgctttcaatggtggacaaataaccagctttaggctgatgtctcacatcactatataagcttgtctcattcacttccaacttcacgtgtggcaaaatgttcaaccaaggattttcactataaattctttttgccttagcccatgttccatccagaacaatcaagttcttcacctcaaaacctatagcatccaggttactaacatcaacagccttatcagagggaaatagtagtaccgatccaggacgaacctcaagctcaaattcatcacattcttccaatttttcatccctattcagttgcttcctctgaaacttcttcaccaaaaaccctgttgagagtgcttcacaagcttcagggtacgccaaaatattgtcaaagcttaacttgggggattgacattgtgcttgagtcatccaaatatgagacaaagagctaatggcaccatatttgccaatggtaacagtaacagctagctttccattctcttcatgtacacctctagctaaatcacactttagactaattgcatttttctcaacttcatcgttcaccacttcaccatcactgatactcacttgtttcacaacttctacattagaagcagaatccagaacatctccaacatcatttctcaaaccacattttccagcactatcggtatcaatcaagttagaatctatctcagaaagcaatttctgggtgtctccaatttcccaacactggcgagaaaacaatgcagttggctcgtttccagcatgaccggaatgggaattcggatccaacaaccgaattaggaaccgggcttcgaaattaacatcagaaacagttgcaacggtgagattcttgaggcccaatatagcgattctggtagaattgaggggatgcttacgctctagcgcgtgctgtaggatggttacatgcacagaattttggagacccggtgtgaggattcgagagcagagacacgttcggctgggtttggaacaagaagggcaaatgggtcttttagattggccctgttgcattgtcgacatcgaaatctccagggctctccgctgaaagagcttgtggctgtgtgaagggttgaacctgaaccaggtgatgctccggattcgggtaccaagaaaagccaccattattagcttgggctgctaccaaaaccctaaaacggtttgaatagggattttttttttttttttttttttttatgaattttaaaggataaacaatatttttaattcctaaacttttttcaactcttatagtttttatcttcaatatttcggaaacgggtcttggatcttggttcccagactttttttcctttaatattttggtcctttctttgtttccaaaagagtttaatgttgtaagtgatgacgtgatattttttattacttttttttgttaaaaattgtaaaaaattgtttggataaatttttttatctttttattaatatttattaatgatgattaatttttattaaaaaatttatctaatcatttttaatgaatttttttatcccagtcaaatattattcatcaacatgactcaaattaaatactttatttaaaaggattgaatttggtatcacttatatcaatgatttaataatttatttgaaaaattttaaatatattgtaacgacttttaagtgttataaattgttataatttgtttgaaacataattaaatgaaaatttaaaaatataaaaatgtgagttttttaacttttttttttgttgctaaagtaggttttaaaaaaattacttatataatataaatagagttatgttcaaaactatttatataacatgaattgtttttgccatgcaggatgtgttttcttgagtaacgatcaatatatttttttacattaattatatttagaatcgatgaaatttgtttttttaaatgttgtaaatataaaaaagtgtataaccaaaactagaaaacgatgcctcttatatgctaaaaaataaaaaattaacacaaagtaccatttggataacactttatcctaagtgacaacccgtaacatataagtaattttaaaactactctatttagtttgtttttcttaaaacctatttcctaaaaaaaatttctcgagaaaatttacatgtgagtatcttaaaaatgatgacattttgggatcactataaatgattttatatatttcatgatattcaaattgagtttcttaggtatcttggattagtgatgcccttagaccaaataggtgtcattgtaatttattaagatttaataaaaaataaactccttttataaaatgaattttcttaaaaaaaaatataacataacagtttaaaaaaatgagacggtagattgtgggaatgattcttaaggagcaggtggagggtttcgtggggtgttaatatttgacttgtgcattccacacgctcccatcgtcacttcccagttccaatctttcttccgattgaaggcatctaaggagagaaaaatgcacgatttctgcttcacgattccgtacggattgatgctagtgggtggtggactgttcgcctacataagcaaagggagcatcgcttctctcgccggaggcgccggctccggtttgcttctcatcatcgccggctatctcagtctcaatgccttcggcaaacgaaaaaactcttacctcgctctctttctagagaccggtatcctataatttctttcctttcattattattattattattattattattattattattttgggtgtgattgttgacctggctctcgatgattctggatctgaaacgtgttctatgctagaatttgttatttgatggaaagatgtggatatttattggattcattttttcggattgtatgaaattctggatttggattctctctcttaggatgtcatggtgatatttagattagtaattccatgttctcctaaaataatgcagctcaagtatcgacttatgaaaactttaagatgcatatgttgttttaacttgtgggagaagtctgatctattttattttaccctctggatttgcgttaggtgtttgttgaaatgtttatcgaaactctgcctaaatgctctttgggtttcaaagatattgaatgatggtgctttttcatttactactttctattgaaaggaaggggatttgttaggttaggttaggataggttaatagggtgtctacctgatggagggaaagtgatacatagatctgaaagagggtgtctgtgcacaatattgaatgccaaggaagcatcaatgaatgtatgtaacctgatcaagatatattgggtgcatggttttcaaatttccattgcttatttatcagacttggatcttgccccatacacttttgtcattagtatagttgatgaagtggaacatggtttgtcctacaagactataactagagctttttgctttagcttcgaatataagcccatgttttagaatataatgataaatataaaagatcaaaggagggggatgtgtttgtaacaaatattattcgattgaaagtaaaatttcttgacagaatttttttgatttaaaatgcttatgaatataacaagtttattatcattaagttaatgacttgcattgctcctacttagtaataaaaagtatgcacagaaactctagcaggggtatagatgtatcacattgcattatcatatgtcaaaactcaaaattaagcaagaatattttagtaagtcataagttatactaaattactaccaatatatataggatcaatgagtatctctgtgtttatactgggaatgtatgtctgttactctgtattcatttgataagctatgatattaagggggtcttgctctggttgagcaagggtgcatgagttgttgtaaactccctgacattgtcttcgatttctatggataaaaaaaaaaaatctgataagccatgatcactgagttaattatggtccatattagccggagtaattttctatgcttttttttttctaatttgtatactgtgaaacagcttgtgcagccatactaacttgggtcatggggcagcgatatttggaaacatccaagattatgcctgctggtcttgttgctggaatcaggtaatcaaaggattgattagaagtacccaaactcgttgtaaacatagttttacttttactctcagagttgtaagaactaaatttaaacttttaagttttaattgttggataagttgttagtttgtagattataaatccttgaacttgtctttcttaaaagtaaatgcatccatgaaagttctttaaactctttttaaaagatcaaggcttcaccattcccatttattttgagaataaaagaaatatttttatgtgccattatcctgaacttgttttctgctagttctaaaatttgtttttaacttcccattactgatttgaagatctatatattatgttctgaatttgaagtcaggaatcaagcactggcagccattacttagtttatgttttgtgagtttgtccaattgctccacatcagtcacctgtagtttgtatatggagttaagatatttgtctgtctttttcttgcagtgctctcatgactctgttttatctctacaaattagcgactggcggcaaccatctccccaccaaggctgagtgatgatataatgatatatcatatatttgcttactataatacagatatgttggttgatctgcatgccttagatggttaagatatatcattgtactttagtgatttcaaagtatggaacaatgttgtgttgtcgttgtctttatacacgtaggagaattgggccagtacttcatcactctctaagcagctctttttattttctactttcctttttctcttagcttagcacaccttatcactgaggttgcttaaattcaaaactggctcttatttgttgcatactcgacaaactcgatggaaattccaattgaaatttatcaagcctttttatttgactggtcaacaaatttacatttcttggtgtgagtctactttaaatatggaataaattacattgtcaacaactagatcaggttctaacgcgtgcctcccaggaattaaatttttgcttattgcattagctaatacttgttgtgcttatctaaccatgaaattaaacttgtgatgaaaattctttaaaatataatttgtaaaatcatttttgaaaattgtgttttgaaaaaaagaagggagataaagtttatttggtgaggctgttttaaaacagattttaaagttagaaaacaaaataagaattaaataaaaaagttaagttttattgataaaaaacacattatcaaacatttatttattttcaaaattagaaactgttttaaaaggattatcaaataagtcctaagtttaaaaaataaaaagaaagaaaatagtgtctctccccctttcttcctaccgaattagccaatttcctctcattttcttcatctttccatgtttttcattgttgctttgattttgattctttctaagttccctttaaaattctaaaaaatcttttgagctccatatattttgttcccaacccacataactttgagaagttttttttttttttagttaaggatagcgtcctaagaagtaaaataagctagttattgctcaaaaatgaaaatactacatgagctctttgcggtatatccacaattcaaatttgagaaaaatagttttgatatgttttcaaatccaggaaaaatatatttatagctttgagtaccaagctaaattttatttataaacatattgttaaaacatcttcaatagtaacgtgggttaaaatagatctcacaagttagcactttttgtatttttttaaatgggtctaattagtcatctcttaattatttttaatggttaataactgatttttttatacataaaacggaatgagctcatattattgatgatgaaagaccgtataaaataaggaatatgattataatcatgggaactaacattaacagtagttacccttgcaagcaaatggacaactacattaacttgtctaataaccaattcaactttgaattgaggaaattggtccataagttgcttacagctttggatgataaaggctacttctgtttatattcgttaaaaaaaaaaaaaaaaagactgattcttatatacgaatgattctcacatattgcatccacttcatcctcatccaatggtgaactcagttaagaacaattcttaacttcaagaacacacctatcctgtcaaaaaaaaaaaaaaaaaaagaagaaacaacccacctaaaattaccgctggagatgctattaaagccttggtgaatagttgtgcctcatattcaataggaattatctccgttatgattctagactagttggcaagttcttcacgatcgtagaagctcgagaaatctagaaaagttctggacttgatgcccttctactaaaattaaactttagcaaataccctcgagtgtatcccatgtaacgccaaaaatatatttaatcttaatatgtctacatggattgtttttatttaataacagcttatttatttaataattagccaacggtgaagatttgcttctcttggcattggcgccatttgataagaaagtagccgttagacagagagaggaggaaagaggatttggcgcgcgctaatgccaaaccctatataaaggaaacaacagaacagagacacacactctgcatctgcatcagtgggtgaagaaagaaagaaagaaagaaagaaaggagaaaagttgaattggaactgttagaagagaacgatgttaggagggaacagcagcagtgagcttcaagatcatcatagggaggcactcgtctcgtcggagggtccttctctatccacgtctccatcggatcaagggaataacactctcactccgtttcttcacagcacctccattccggtgttgccagccgaggttgaatttccaagctctcagatcaatcatcactcgcggcctcctccacggaagtcccgtgagcacaggagatggactgaagaagaacacctgtactgtttgtctctctctcagtgttttctttcttaatattgctgtttcattgtttttctctcatgattcaaatctttataccaatatgtaggttgtttctccacggacttgagttatatgaaaagggagattggaaaaacatttcaagaaaggttgtcaagacaagaactcctactcaggtggctagccatgcccaaaagtattttcttcgtcaggcctccgataatagaggtcaaagaagaagtattaatgacattaccttacaagaccccgtccctcaccgcattgaccaccagaatttggttgcatcattcagtccctcacaacatcaatcagcgacattaggttccacgcagtgcaacactgaatcaaaattagcatgattgtttatattgatatctgttcatttacattgtttaaaattgttgaatacatagttagtcatgtttgaaattgttcaagaaaagttaggattaataataattgtggaaatttctgtagccgcagagttgatgtttcatctttgtgtttgaacgaaaatatatagcacaattttgattagtcttccttaaattgcttcctgttgtatgtgtttcatattctttgactttcataaagcgtgtataatatggtgatgatgtataatatggcattgtagacccattgtttgtcaaaagtatgacatccctgaacatctggtgatgatgttgatgtaagagaggtcgatttctcaatccatgatgagcctttgcttgccatgcaatctcccgaaacacaatctgataacaccagccaaagtttggaagacatggcagtccattgtctgagatatttttattttagttttatttatttggtgtatgttgtcttcatgtgtatcagatttacctgatattgagtaagctttaatttctattttgtagagagaaagtgaaagagggagagagatagagatagaggggtatatgagtaaactttaattgggtactttataatgtataactactcctacctaatatttatattactaggttaagtacatacaagcacataggtcaagaccgtatacagactaaaactttactcttagcactcccactcaaacgggagtataaatgtttttcatgcccaactcgtaacaaattaaatttctatgcacttcattaaaagcttttgcaaatacatatgctagttggtcatctgtcttgacataattaagaggtagatacaagatttatgttggaccttatctcagatgaagggacaatctaccttaatatgctttgttcttttgtgaaagactagatttgatgtgatgatatgaatgacaacttggttgtgatcaccccgcagtttcataggacaagtattagcaagttccatctcctacagaattggtctcacgcatatcaactcatcagtcataaccactagtactgttagtattttaggaataagataattggattgattgtttaatggctgttgacgttggctttagagaggttagtaataattgacttagtcaagggaattgtatagaagtgtaatagtgaataattggccgtgtagctctcaacaatagtggaggagcttgtgttgatctctcaaaaaagcacactacaacagagtgcagattccatatttacaggcaacacttcactgactacatatgtgggtggattattaaataatattatacattattctagcattttcctaacttaagaactatcgagacatttctattatctatgtgactactatagctttatagaaaaatctagaattatcaagacacttctatagctttctttatatatacacacacatatatatcaattataaccattgacttcaaatatgcatgcctaagtaatgatggccctaaacacagtcaaagtgggcgaccacccaggacctcatatatagagaggcactcttcttcttaatttttaggtttaaattcctgcaatttagcattttttttcatttttgtctttgaaaaaaataatatattccagttcttgcaaaatgtgtgttttttcttcctcaaagtgttttagataacactttttttactatttaaaatatattttttactattcaaagtgatatataaagtattttaagaacgaaaattaaaaataaaattgcaagaactaaaatgaaacaaaaattgtacgagtgaaagcaaaaaaaaatattaaattatagggatgaaaaaaatatttaaacctaatatttgttattaactataccctttatacccataacattgttacataaccattattccaaaatgtattttctagaataatattttgttttaaacatctaagaaagtactttccgaaatgttaagtattaatttgtattttgaaaagtatttttcgtactgttatgagtttcataaaatactttacaaaatgttaaaaaaaaatggaaaaattcaagcagaacagtaggagtctaggaccattaaaaaccctatacaaaggaaaaattatacaatattgaagcaattcaagtgaaaaaacatataattggtaagggtccttcaatttagacaactctaaaagatgtttggctgcaacaacttagatatacgttgatgcatatataaaatgatagacattaatagtgttgtgagagagaaaaaataaagcaagaaagaaaagtagttgagagcataaacatactacattagattagagtataaaaatcctaatgctaaagcaagaggtcgagcaagagatcaaatggggatgaagaaagtaaagagaagaggaagcgaaatgaaaaagatggaaatgtgtgcaaaacagtgcacatgaatggccatgcaagattaattctcttgcaccgaccataaaataaaacaaataaaaaattagaaaacttacctttgtttaatgttccgagttacatggttataccggatttgaaaagtgatatatctgtattgcgctgcgttaatctatctgcaaatgtctatgttctttaaatggtaaaagcaggtaacacttacattagagtgctgaattggagtaaacactaaacaacgaaattgctactttcacaactcagtacagtttttgaagttctcaattcaaagctgccaaacccattttagagagagagagagaaaaaatgcagatgcaagacttacaaaatattttacatagcacttattaaagttaattttgcatgatgtacatatattcaagtcccttatatttacactgttgaatctggctacatagataatccgaattacatgaatgtctaatataagttcaagtttgtaataataaatacatacacgatatcgaattgtttgaatttctttttacattaaatggatacaaacaataattcatgtggcatctcctaagcaatccaaagctagaagaccaaaaactctggtcacacgcaatcagcccttcgattggaggaaaaaattgaagactgctagcaattctggggtctggagtactttggaggaagagatggacacttttcattcatatgagggtatggttgcatggtgttgtatccaggtaattccattctatacttgcctttaatttgacaataaggaagcttcaccgtgtctccatcattgcaccattttggcaagcgactagaattgttctcaaaaaaattgagaatgtaagcatcttttatctgcacttattgcacaaaaataagtctatatgcgccaggtcaatatactactgtaaagtgtttttgacttctagaaacacaaacaatatatgtagtgaactgatatcaatcctgctcaacaacctgatttcactttgtaaaggattttgttagaaatctatacaaccatgataagaaattatatatgctcaatcatttgtataaattgtgtaggatgaaattcaaaagttactataatattgcaagcaattcaaaagaccaaacttcccagcaaactcaccgtaaactctgtcacttgaacggaactagaaattggatcaaatagcccagcctccttgtacatctcaagtatataagcaatgcacgaagtcgacttcccatcactgtaggtccaataatcttgttcaggaatcgtcagtagttcatcaaaagatgatccacgcttttcaacttctactaaaacttctggaaggtcaagtccctgtagaaacacaaaagggccacatggttcactttttttcactaatgtggaattctatattgctgattgcttactaatctatgcaatatatcacatcacaagcatcttatgacttatgctagacaattgaagacattgattcaatttactagcataagcaaaaatgtttagtatcacatatgtatgtgtgtttgtgtgtgtagacatccattcaccaacttgtgttgtctcacattgatgacattgttatacatttgtaacatgtgaattattcgcgtagctgtgcgtattatttaaattcctagtttccacatttaggagatttcagcattaattataatacattttctgatcaagaaataaaattattatttctcctttttcaagtgtgtgtgtgtgtgtattggagcaagaaacaagattgcagcatactttagttccaagtcgtttgttcaaggcttcattccacatatttgctgcatattcaggttgaagttgactccaaattgtcataacgcaagcaacctgcagagaaacaaaagtaaatgctcattcataaaacattaagctatgtagcatgtggctaaaccaaaaaaagacagaaagggcagaagatagagaaaacaaacaatcaataattgataccacattcatcactttttttttttttatgtgaaataacattttcttcaatagcaatggtctttctggatggcagacggataactatacataaaccagcatatggtacggtaattcaagcaaaactttatactattcaagcaacttaagtagaaagctcattgagttcttgcaagatcaaagccatggtttatataattctctgtttgaaatatttcatacaattgctagaaaattgtaggtaaaaaatgctaaagcatggcataatagtgcaaaaactcaagatagttgaatctaatgaaacagatgaattgaaatttaagcagaacaactgattaaattaataccacattagcatccaaggggggtggatagtttccatttaaagtgtctatccaactgaatatcatgttatggtaaccatatggttttcctgccatgctcagtgcatactcccatgcagcagtctcattaaacctggcacgcaaatcagggtgcaatggaagcagagcaatatggggattggaatcatcttcattcagttcaaagtcccaccactcttcccatggtatcacagctattatatcttctccctgcaaacaaaaggtgaggcaggaaataaaatgctagcaacttaactccaaatgccgctgcggagttgacaaaccaatatggactatacttttaccatcattgctcaaacaatcaaacaaccatcatgaattatgtcataaaagaaaatctatatatgttaacttggtaatcaccatgcactaattttttatcacaatttcaaactgaaactgagagcataatcttgctattctgatgacgacatggtaacttaaggaacttaaaacaattcttcataaattatatcaaaacctaaacatcgcataggattcaagaaatgttaattttcttaaggaagaaaatataaatattaatgaaattataaaaaaaattgactatgaaacatggtagtgaaattgagattcaaattgtgaaccggaaggcctattttccagatagcaaattgaactgtatgattaatcataaaacataacatatacaactaaaaaagacataaaagcacaaattcattaaaaaaacataaacataggagcattttaacataaggaaacatattaaaagttaaaacatacacgtgtgttggtgggggggggggggggggggggtagtgttagcattttgaagtcaaattgcttacaaagtgacataagcttcaaaacaaaaaaaaaaaaaatcaccaattcttaacagccatatggacaaaaaaccagtagctgctcaaactcagcagtatgagtgtatgaccaccctaaataagagtggaccacaaagcttgcatgtagggtagattgggaaaggtaaagaagagtagaagacaagaagaatgagtagaaaacatgaaaaggagacaatgggctgccatgcggttgattagagggaaagaattggccaattccctctctttttcactaatttttcaggtaaagaaaaacaattttagggttcttcaaagttcaaaactgggtcctgcataacccgaaccactttggtgtgcggtcgcttgcaccaaaatcacatgattcatgtgcaatctacaattcctatgtgattcctgctattcatggggtgattcaagcacaaaatgtttcactcaaggaattgagtcaccaactgctcaaatcgaatcgtatgcctttgtatcgtgaaacatatgatactgacaacggtgctatgaaatataataaatcttgcacagaaccaatagatataatgcaacttaaatattttaccttttcattttcatgtcctgactctccaacccaaagcttcccattggagtcccttaggcaaacagcagtgtgaccagcataagctccactaacccacttctctagagtctcaaaagcaccccaccgacctcgaattttcgaaacggcaaggaaatctccagaatgaatgtcatcagcactgacatttgtaacaaaaggctgagggcgcacttcaaaagaagctcccatatgcttctctaaaaatttaatattggagttctccccccatccagtatttgtaaatagaggcaatacctcccaaagtgcttgaagggtccccaacatcccagcttgcaagaggaaaattgataacccatggttttttacctgattgcaaagaggataaggatctccaaaacaaaaatgtgtgtttcaagtttcaaaaaactctacttagtgacagtgtacagaagaaagatggtcacttacatactcatactcagctttcccttcccactctttgaactcaagcgtatgctcccgggccaggaaataataatcccatgttacacgataaggggtggcaaaaatataaagatccatgcacgtccaactgtgagcattgctaacctagatcagcacatagataattatcaatcagtttccgttgaatcccaaatccatacatagagagagagggggggggggggggataaaaagaatacaattatagaactgcatagactaataggaaaatactaaacatacacccaacttttcttccatctcacttctatgatctatcccatttttcttcctatttctcttttcattttccatcacatcatttgccacatctatcagttcctctctatttatttattctctttatctctcttatttccatccatacaccatatttggggagtaagagtttcattactctaatgacatacaaaatactgagcgacattaaatccacttaacttagtctcctctaataatttaatacgctttcaaatgacaacacgtccaaccaaaatccaccaaattacaactcaaccacataacataatctatgcattccaatattaaaaaaacactctttaaatcttaatgacacctactccctaagcaatttttttaaagtaaaaaaaaaaaaaaaactacgaaatatttcaagagtatgaccaatttttgttaaccactcagaatgaagatttcatgaaacgaagttgacctagtccttcaccgattagtattaaataaaagttcattacaacaagaatgacttatcataaaatttgatttttttttttttcaacaaaaagaagtgacatagatttccattcccacacttgagaaggaagcgaccttgatgtgaagggttccaccgccatattgagagccgctcttgttgtgaaacaccatccaggctttgttctcgtagaagcaggcgcctttccacttgagactgtcgtccggcgaagaggcggcgccgacgaagacggggaggagatccaccgctctgtggaggcggttgaggatgggccacgacacctgtctgggcagcagaggaagcacgtctcgcgggtgaaacggcgatttcagggcccaaacttgagaacccgttacgcagactgataccaggaggagcagcagaagccacgctatcttcatcttcgccgtggcacgagcacgatcgaagaaaggagaagaaactcttttgaatgttttttgagagtcaactatgcatactttgctcctccctctattttgtttggcatacaaattattggaattttttcgtgtttatcttaattaaaattaaaggtgaatttaactagttgattgaataaaaatgtatgatttgttatcatcttcttataaaataaaataaaaattttaaatttataaaaataaataaataaatataattttttttacaaaatattattactaatagtaaaattttacattgtcatttatcaggggccctaatcaagattaattaactaaggggatgttgattttttaactaaaaatctgaatttcaagttctctatgaaaaattatatcaaatacttaaaatgataatttttaattgcctatatataaaagtgtatatctattaaatttaagttgtaatattttttttaaaagaaagagagatatatatgtcattttattcataataagaaaataaatataattgagtatatgatcaaagatataaacactagcatataatttatatgctcttattaactagtgaataacttgattagttagtcttttaaaaatctcaccaaaaaattaaaataaataagatctatatttagacaaaaacgtgtggaaatctgaaaatattaataatctaagagcattgttggatacaaaagatatattttgagctcccataccataaagtcgtatcaatgctttgtaagagagcccatgcttttgctccacgagggttaggaattccaccttgataaaatgaccatgtttatctcaaagataaataacaaccccataatagttatgctccttcaagatgacatcattttcatatacgttgttgcatttgagacgaccagttgttggtgcttcccatgatagattaattcaaattaaggaggctgaggttgcatgttgatgtcctttgtgattcttcacgcatgcttcaattccattcagaaaagtgttgcaatgccataaaaactgataatatttatttgtggctgaagctcaatattattccatattttctcattttgcctttttcaaatgcaccataaaataacaagaaaattgcttttaacatctagagatgccaggagattgaatattaactcataaattccttcaatgctctcactttgtttttaataactcgtcataatccaactgactcccatactttctcaactttaattgaggacacctgaaaagaaaatggatcagtcattcaatattataagttataatattaatatttaattaaaatatattaataatataaaagttcttatactaccgtttatatataaattaacgtacgtgtataataactttattgaatattataattactgtaaaactcatatttataatatttttaattaattaataatatagaaattttctgttcaatttttgtacagtgtgagtataaaaaggtttacagtgttaattgattagaaatgtaataagtatattttaaagtaattattgttaaaatcaacaaatttatagtacatgcattaaaaaaaattaatattgtataataacttatgattgattaattatataaaaattctttaagcaaatagtgtatacttactcaaatttgtatactattaaaataaaaattaaaattatgtaaacatacgaagatattaaaattttgaggttaaatatcaagtcttgcagttgcagacgtatgaaaaaaataagttatattaaaaataaaaaaagacagatattttgttggttcggatgagatgagaagactgtgataatcataggtgaggtggtgattggtgaattgaaaggtgtccatgtgttcaaataatgtaatactacataactacaaccccaaaagatcatgttactacaaaaaagatggttgaaataatataatgtgtgatgatacttatccaacacgtgtttaaactataaaaatgatgctaattacacagcagagttgtttaattaaaaaaaaggtcgatgtaatcaatggctgtcgtaattaaccaattgtttgatctctcaacaggcatcatatataccgtatataaatgtcgcattaccacatggttagctttcgatctcatatgtttgtttttctatgaaaataatggtgaaatatattttattcgagttagtaatatctggccaaacatgtgtgtttctttcttactagtcgtgttggaatttttaaaaggggttcatacttattttgtttcatttatattttcaaatagattaaatattcgattgacacgataaagataaaaaatatactttaaattaagatagagactaagaattatgaaactcatataggacctacattattatttttaatatctcaaccaaatataacataaatgccaaaattaagtcatcgatcctagtaaatttataatgtttgtaagataaaatagtagcttaatctcaatatattcataacactaattatttttttatcagtgtgcaaataataaaattattatttttatacattttttatatttaaactacaactagatagatttccataaattacaaataatgctcaacacaactacttgtttaacataattttttttagctaaatactcatttttgtctcaatatgtaaaacataaataaattcattcttaaaagatacaaatttaaattttatcctcaaaagtgaaaaaaaatgtaacacatgtgtttttatttgaatctcatatttgggataaggtattctcagattagaaattttaaatcaacaaataaattataaattatgtttattattatgtttgttttaacttatatttgttttccttttttttaaagtatttattgtattattatgcttgcaataataaaaaaaagagaaaagatgaaaattaaattatatttttatccttaaatgaaacaaaatttagtatataataaattagtccaataaaaatttaatgacattttggttcaataaaaatttactaacattttagtcaaatctatatattgacaatcatttttatgacattttcgttcttatatgacacaaactttttcgccaataatgaatgaaagttaacagattgatgaatttgttgtacttctttcattttcaaaaaataaaatttgaaattttattttttggagataaatttgtaagtactctgtacatataaaaaatgattatttatcctaatttttttaactataaatagaatattagggatttattggaagcttcaggtttggtatattccctttataccattaatatatcttataataatgttatttttatctatctgtttatcgaattctgctcccactgttggctaatcgtgcaaggaacatatttacttagcaacaatgtcgtgacaagtttggcaagtagacggaaaatctaaaaagtttggaaaaccacgccatccaataaatttcaaacaaaacaaatcgtgggcgtcaaagttgcaattgttttggtgaattggtgaccgtagcagattgctctgtgacgttgcacaaaaacttcaatcaaacaaagaatacagtactctgcacaatatattatagaagtaataaaatatatactaataatttctaaaatcagagtggcgcagcggaagcgtggtgggcccataacccacaggtccctggatcgaaaccaggctctgatataaaagagaaaagcttcctatactttttttaatttgcagatatactcttatttatttcaaatcaaacaaatacattcttcctattaatttcaaacgaataacatttattcacaatacatatcttatcaattaacttcatccccttttcttttacctttttcatatttcataattaaaatataagttttctttacatttcaaaaaaattgcatattcttttaccaattaaattttaataatcttcctttttgtgtatggcatcgccactacctttggcagcatccactaattaattacattttccaaatgcaaattattgctcttattatgacatttgttaaggaaaaaaaaagaaaagaaatgtacttattatatttagaacaatttttgtttaattcttatttttatgaaataaaaaatattcagagtgggtctaataagacatttcaatttgtctataatttattttaatatcttataaacttatttatccaaaattaaaacgttttgcataaaaacaaggacttgaaaactttatgtaacgaaaaagtgaccgaagatctaaatgtattaattaaaaaaactaaattcaagtaaaaaattgtttgtaaaaaaatacatattaattataataaagaaataaaatgctgttaagcaaaaataaaaatgatgtcatactaaaaataacatttctctttaaatttcaatgtaaaagtgaattgtgcaatctttgtttgttttttaaaattttgaagagaccaatattccaacctttagcgtatggccttcgagccttgtttatgttagaaaagccacctacacaagcaattagtatatttggataaacaatttaatttattaattgcttattattttttattatgtaagagattttgtctaaattttaccataaaacttattttcataaacttcgtcaagaaagtttatttttttattataaaaaagtagttaaaatatttcttttctttactatcccaaattcatttttttctagcatccaattgaattggaatatgaaatatcataataatgataaaaacatgatgtattttttttttatattccttaaaatgaaacaaaatcttgaaatacaggttgaatttttcaattcatttcaaaaattaaattctatctatttgttttgttgtaataagcatttgtggattgaatgcaaaaattattatgagttaaattataaaaaaacaaattaaaaatgaatattcgtgaacagtataaataccaaaaaaaataatgattattttcttgatatactgagatctatttaataagttgacctctttaacatatatttttaaatacatataaattatggataaaagatcgaattcaaattcttaaccacgtgcaggtacttatgaaacaaaattatataccaactatgtgatactatgttggtgtcaagaaagttattaaaagaatttgcaattgtagtggaagactacattagagtatcaactgctctctctattttgctgggttgctcagctggtagcctcctctatatggtttggcttgtgtcagaatgatggcattttggtttttctttcatttggttaacagatcacatttatttcaatgcttatttttaaattttctctttattatgttcacccctttgttggaaatatttcttttcacttatcttttaaataaggagtttgaaatataatactcagtcctcgccaatatgtatgcacttttactttttaaacatgttcaaatatagtacttggtttttttaataaacaattcacacaagatagtaccctcttcaacgcttccccagtgattctttgatattcagtgcgccctaaatctttcaaaaagccatgttcaggttcgacaccaagctgttttctagagagaaaaaaattgcacattcaacatatctggttcatctatccatttttccaaagctagcttgctttctggtttccttgtcaattgtcaattactgcatggaactctcttaccatcacagggtactatacatatgactcggcaacagaaacataatataattagttgtctctacattagtcaccctatccattataacttctgaggcagcatcctttggtatatatcacatatctgaaattaatattgctgcatacttggaattatccaagctaaatccgcacaccttacctaactttttttgtcaccaacacatgcaatcaacacatttggtttcttatgcatttttccaaagcttgctttctggtttacttgtcaatcactgcatgaaactctcttaccatcacagggtatggatatggcccagcaacagaatccataatataatgagttgtctctaaattagtcatcctatcccttttaacttctcagatagcatcctttagtgcatgcagtagttccatgaaggtcttaatacattcaacacatagcaaactaggtttggactttgtacgcactgtcacatcctaaataagaaaacacatttagaagaaagaccggattagaagaactaacatttcaaatggtcactattgcaagtttgcaacagcagcgtattcgccaaagagtcccacatcagttagtcaagaaagcagcagaacatgtaacagaaataaaagcaacaacaatatactaaccaaagcatgcctttctcggccttttgacagtgtagtatctgttcttatcggtttaagtattcaagtgtcgcctatttcttgcaatacagtataggcctggcacaccctaccaaattgtttaatttatggttatattgtttgtgctatctgcttgtacgatcgaaccattagaaatgattcactataaaacctattggctattagagaaaaagcttggttcttgtaatacgttttgttaaaattgtgttattgaataatatttgattggattagtattatgttgtgtacattttattttattgttttatacttaaataaatggatatatattatccctaggcacatgcattgaattatatgatacaaaggagttagtgttttcttggcagaaagtttattgaactttggtgttttatgcagattcactgaagaaattaggcacatttaatagttaaattagtactttttttttttctctttcccttttacttactacttaggtatgtagctatctaaatcacttgatattggcctgcatagccttgtgtgatacagatgctactgaaaatcagtttaccataacaaaagtagtcatctgtaatctacaatttagattttattcggtaaaattaatatacaagtgagcattatatccaatgtaagataaaaagattagagtttatcagaaggaaaatccaagtgccaatcttattaaaacctagctaataatgtcttaacctcattgtaaaacaattaaatctaagagaagtcaagtccctagctgaatgccctggcagagatttagaaggtatacatgactaattggagccatttcttctaattccatgtgagtatagtcgtctcacagtcatagcaaattgaaatccttttagttggggttataattggattccttgtgtcattattagatgttacttttgaaggcttataataactttaaatttacttagcattgcacttttcagaagtattgtcgttccagttcatattcctaaaatcattttatgttttagtcttatatatatgtccacagtccaccaattgtaccacatttaggctccacatagtgccatattttaggacagaagttgatgttcatatatagatgaaggttattaagtcgaggcctatctttaagacacattttccctttttgcttggtttttgtttaccactatatggtccccttttgcacttattgtttttttttttaagttccctttgaccttattgctaacggataccattgaatttaattgtaaataaatacattattcaatacagtttgaggcaggtgaagagttcctaaaaaaagttgccatgttaatgaaagacctgaaaatttatcacgatggctttgtgcaatttaattcaattttttccccatttttaatgtcctgatcgtgtagcatttacagtttttgtttcagtaggtgatctagatacctagaaactttaattagggcaagctttcactaatctaagaacagattgctgaacctatcttctgattattgtcgattttagatcctttaattggagctagctatgttttattgcttttgatttcttcagttcaaatcaaagatgaagctttttggttacaataatggggaagaaatcattgcaacccttgttggtaaaaagagtcgtatgacggaacgcaaaatcagcaaatattatctttaatttaatttattttttgaatgaaattttgaattgatacttgtaaaagacgaaataaaataaaccaatgaggtaaaatgaattaattttttttatcaaaattaaaattaacttgtatacttcaatttctttttaaaaaatcttatttattttctttttaaaatacttataaacttagaaattcagcattttggtcttaaaaaacttgtaacaagatattacaattgaaaagttcttattagttaagatgtttctaataaataattgtgaatgtatttatttcattatctaaattgcatttcttcactttagagaaatcttattttagagaaattaaatcctttttttcttagttcccatattatagcagccagtgacaaataaattgacataaaaattaaaaaagttaatcctactattattctaacaatgatacatatggcagaaaacatccccccccagaaatacacgatttcatctttatttttctccttatccatccgagtaatataatatttcaatcttattgttctttatcctttttctcttctctcattttttttatatgtccaaatccgaacagagtataaatgtaaatacctcatctaacaggaattagaatcacaattgctgtattttttggaatctcagtccccccgctccctgccagttttcatgaaaaattaacaatatattagtccaaaaatgacgtgctcaacaaaaacataactttaaatttcggcatatcacatgtttaatagtatatcatattttttttccaaataatttttgaatttggactgcaagtttcaaaaaagaatatattctctggaatctgtgatttttgttataacatcaactttgactgacctattaattttccttgcaaaattggctttttattagtgttccttgtctttggaacgtgtacagagtgagtcttttctttccttaattttttttttaaaaaaataaacacttaattttctccttcaaaaattagagtattgctatattattttccccaaaaatttggtaagttaaatatatattaaaaaataaaaataactaattttatgtcaccactttatacagaacaattcagtgacattttagattcataatatttgaaggattaacataatagcatactaatatttgtaagattaaaatgatgattctagctctattgattgaatgaaatatataagttgttgttataaattctaagtatttctcttctatttgtatggataaaaaatattataattattttattttattgaacaagaatacaagaaaatattcatttaatcaaagtgaaaaaaaatccttatatttcgtataagttaggaatacagatatgtagatgggtaaaattataatttaaaatgtaatatactacatataatattccacctaagtactattaaagagattggtatattaatgaacatttaagtaaaaacccaattttttaaataaaaaaattgatgtctcatcatatcatttaagtgagtttattgtcattcaaaaagtttaaagaagtattgtatagatcatacacaaaattaggtacatgcttaatcaaacagaatataactgaggtagataggaaggatacaaagtagatataagctgtccatataaaatagttgtcataatttattcttgactagtttcattaaggagtgatcctctccattttggttggcataataaagtgcaacctaagagagaacacttaatgaaatcctatattgaggaactttagataatgatattaaagatgagtgactccctaacggtcatttttggattagcatatttgacattcatttcttttcctaactatggcctttgaataacaatgaaggaaaagtaaccatgccatatgggaaagtttgtgtgaagctagaactcaggatcaatttggtttctgcagggccaatgtttcaatgaaaaacttcctaaattgatttgaagccacttctggagggtctaagactgcatgcattggatattggctaacatttgcatgctaagagacagatttgaaaaacagatgcatgaatttgcaattctgtaaatgtgggtttggttagatcaattatttaggagtggaagatgagtttcttttcatgttgcacatcacaagagaagatcgacaataactcattgaaaaggagcagtaagaactaccatcacgcaaaagctctgccatgtttagccaacatgtgttttaaatctggtattttttcctagctccaatgctaattttctcattgtatcaatttttcggccaacattttttcaatttaatgtctcatatctacagtttaatgttgtttccacgacaaattattttcctctagcacaatcttatttatctcaacatgaaatcctaaaattgaaatccatgaaaggtttataccatcacaataggcttcatcaactttttgattattatgaagcctcaacgatgtgaaatgcagaagtacatgcatatcttgtgcatctctttaggctcccttcctagtttaatgatgttcttagcttgttgataacatgttttgaaataatttgtgccaccaagttcttacagatcatgtaccaagtcttatcatttgacaacaggattcaaactcacatccttgtgagctatgagttttatccttaccaattagggtatcataaacctaaggatctcttactctctacctcaatagttgtgtctcaattgttaacatctagagttttgactttttacaatatattgctaagctaaaggtgcaaagtggtcttatagtgccctatatagtggatttcagctttctcagacattttttttctcaatgatgaatactgatgcttaaaacttgaacaaatttatcttgtagataccagcaaacggaagtacatagaagaagaaatagcaaaaattgggaaagggaatattacctctcagactttttcttatcacgagctatgtgttgcaactcggaactttcaccctgacaatatgattggtgaaggaggctttggaagggtgtacaaaggacgcctcaaaagcctaaatcaggtataacttcaactcgcatctatgtgaatattatgctaatatcatgctaagaaaaaacttctaaatgctgtgttcctttcatgcaggttgttgctgtgaagaaacttaataggaatggattccaaggaaacagggaatttcttgtagaggttttgattttgagtctcttgcaccaccctaaccttgtcaatttggtagggtattgcgcagatggtgatcaaaggattttggtatacgagtacatggtgaatggctctttagaagatcaccttcttggtaagtaaatgcttcttatgtcttctaatgcagtacatcacggataaaaatgagaggaacatccaatttgagtatcaaacttcaataaatgcaataaactaagtgtagtctgtagtggcagtgtgaccagatgagcacattggatcatcatggttattacttattagttacaacataaaacaatttgcatattgatggttttaagtagattatgttttatctttccatttgtgtgagaaaccaaatatatctgcaagactggcaccgtggaagttccccttttcaaaacattaccctagtattttttatttttttttgtgataagcatgctaaatgttatctgaccaacaagaaaagaaaaatgattgtcagaactacctccgaacagaaagcctttggattggcgtactagaatgaacattgcagcaggtgcagctaaaggacttgaatatttacatgaagtagcaaatccgcctgtgatataccgtgatttcaaagcatcaaacatactattagatgaaaacttcaacccaaagctctctgattttggacttgcaaagcttggtccaactggtgataaaactcatgtatccaccagggtgatgggaacttatggctactgtgcacctgagtatgcctcaacaggtcaattgactacaaaatcagatatatatagctttggagtagtgtttctagagatgatcacaggaagaagagcaattgatcagtcaagaccatctgaagagcaaaacttggtcacttgggtatgtcatgaagcttttattatgtgcctagaatcatatttctctggcctaaaatttcaggatttataatctaatcaagggcaaaatgtatcacaagtcccttcatttttggtcaaaattggttttagtccccatattttaaaaataataattttgttcatcgtattttttgtaattggtgaatttcgtctctgaccctagtatcatatgttacattaagagagatgactataaaaaataaaatcatggtttttaaaatatagataccaagattaactttgactgaaaattgagggacctaaaacactttttaccctctaatcaatatgaaaactagtccaaaaatttaagcttagaccattaatatgcacaaatgttcagcaattgacattcataatgtttcttgttttcaggcacaaccactattcaaagaccgaaggaaattttcatcaatggctgatccattgctgaaagggaactacccaacaaagggtctacaccaagcaatagcagttgcagcaatgtgtattcaggaggaagcagatacccgacctttgattagtgacgtagttacagctcttgatgttttagcaaagaggcatatacaagtgggaagacaacaacgttcaaaagagacttttttcgagcatggggaatgtagttgacaaaacgaacctgaaaacagtagaggattacagaaaaggacaatgaatgaaaaagcagctgctaatgaagtttgagaatcattctataaaatttcttaatgatgccacttggtatccttatgaaaatcgatcaaaacggttacatatttttgcatgttcacgatttattgagtagtagtattagataatagatattgataatagaatgacaagattgttaccagattcataattgcctactcttcgagattctctaatcaatactgttacaacgtttcctttttgtttcagctttcataatggaaaataccacactcgacaaaacatttgactccatatatcttgtgttgttgatcataaaaccaaagcagtgaggtcaatgcaattcctttcctccttaaactggcttatctagagtaaaatggtttcatgaagagtgttctggtctttcagatgataatgaaaaatggtttccagttcaaagtggaaacctccttttggtttgacagaaagaacattatcatccatcattagtggcagaaataaacttgcacttaacataaactttagtctatcttcacaaaataaagatatatatttgctaataaggaagcaattcatcttgtacacatggaaaagtcgctgaagaaatgtcttcaaattaaccataataaattacattgctctctttggtcccactttcaaaaaaaagaaaatctacgttctcatcctttaaattgcctctctcaattgcacataaacacttgtaatgtctgaaaattcacccatttcaggatacagtgtaatcaagggttgaatgaagatggcctagggctctatgatgctctcataatagattacttagataatttaatattaaaaagaaaatttcagtaaattttatattatttagtttgttttatttatttccatcaaataatatataagataaaaaaattatctagtaacttgacttgtgttgttcttatgttgtatccattaaaagcaccctaagtgaaaaataattgttacaataaagtaataaaatgtacaattaaacaaaaaagtattaaatgagttttataagttttcctacattcgtatattttatctatttttatgtcaaaattcttaacattgagacaatgaaaaatattttgaaaatttagcaatttattttaacttgtcttttaatgaaataatttattgaaaaacataatcaattctttcaattaaattttattaaaaattgcaaaaataaacattgcataaacaaaacaacattgaaaataaataatatagattacacaagtaggttacataattcaatatttttctcaaattatgttatatagtatcttataatctttatattatttcttcagatgtatttataaatttataaaaaggacctccaatttttgttttaacttcaagccttttttcttaacagcacttcaagactttaaccatccaatttttatttgcacgcttcattatcgtattttttaaaaaaattttgtacattttaccaattcagtgaataaagtgttgatctgtcccaaaaaaattataatttttttattacttttttgtggaaaatgacgtcattttgttaaaaatataatgataaaatgtggaaaaaaacatgaatagtaaaatacgtgaaaattgaagataagatgataaaatgattaaaaaaaataggcgataaaatttacaaaataataacagttaggtttgtaaattatgcaattaagcattaaaaataaaagaaggttatttgataacaaaatgacattgttccatttttttcactatttttagggatttattagtatgtgattacatatttattataattttatgtttgtaatgaataaaaaaaataaaaattaaattatattttaggtaaaatagtgataaattcatctctaattatttaaagtgttgacaatttcgttttttagtgtgtaaagcgcaacaaattcgtccatgaatatatcatctagactctttcattaacgataatgaatgaaattaatggattgatgcatttttttaactttcaagaaatttttttaaaattttgatatattagaaatgaatttatcaatatcatataaatttcaaaataaaaatgagtatttattcataattttatgttaaaagcacaccaaacagcacctaagactcctatttatgcctccgccgaccgagagggcatcctagccttccaatcataagattacgtggcaattaaatattataacaccttatttttatttggggttttattttatacgtattttatattaatggccaaggtttttcaaatattttgctccttttttatatatatatatatatatatatatatatatatgtatgtatgtatgtatatttttatatattatatattcaagtagctggctcctaatctgtttaactgtggagggagcaggagcactcggaggtgatttctgcctcaatggaggtctctgctttaaggccacactgccctttatgccgccgctgcttctcaagtcccttctctcttccttcccttttaccttctcagcctctgcagcggtttaccctttttcctttatctttttttcacttcaaatttcatgtcttttgttgcttctgacctcgcccatctctttaatatccttaaattttgcatcttttccaactgggtattctgcttttagcttaagaaattaacgtttttatgttacacagtaaaatatgctgattgttgtttttttgtctttacttcaatgggtcagtgtgccttgttgttcttcactggtttgaaaggttgtgactggtattaacattaagtcaagtgtgacttttcaaattttacttgtattgtaactgctgtgacaatttgttgatgataaaacctgaaataggttaatattaaggattctatccggggattaacttttgttagtaaatgtgggaatagagtgatgaagagatatattttctctttgtaccacacatgcctacagatgaagctttttcttagcttgtggatggctacatttcattgattggaacctttatttttgttgcatgatgtgaattgcagaagaaaaatgcagtcattccaaatttccctccgaaatagcgctgtgcttagaaattatgtactatgtagagcagatttctcatgctgtctaaaggggatatctgcggggttaaataaatacaatggcgtgaggtgtaagcgtaattttctgtgcaagagtccagtttgcatttcatctatgaaaacttcaaatgcatcaactagcacgttggaggaaatgactgaggaggaagagctgaactctttgcattcatgtgaagcccaagttaggacgatgggcatggcttcttgcaacaatgaattttccgaaaccacttcaggaaaaaaattgtctggtggtgattatagaggctggactatagcaaaagataagttaactgaaaataaaaaggaaatgaacggctcaaataaatttgagagtgaaaatggcagttttagtgcatctaatggagttgcttccattgatcagaaccaggctgttccaaagaacggggatagcaatattgtactgcaggattctggtgcacatgtcccatcttctgttaactattctgtattaaacaattcaaaggtgttaatggattctgaaagggtgattcaccagtataacggatcttcattggggattggtaaagaaaaagtccctgtagtcaatggtgatcatggtttggatggaactgcaaaggattcaactaatgtaacacttactaaccaggcatgtggtactgaccaatcaaagctcctggataggctttgtagtatatatgatgatattctggttgttgataatattcctcttgcagaggaagttgctaagatgcttacaacaaagttccagcatcttatttatgcatgtgataccgaggtataattctttttactgtatttacttgtattatggttactccatatcacaagattatctcctttgttgcttctgtgcacgtgtgtttgtttgtgtactttggacatgaattcaactaatttttatttgtgtaacacattatctgctgattttattgtcttcaaaggtagccaagatagatgtcaaacaagaaactcctgtagatcatggggagataacatgcttcagcatttattgtggtccagaagctgattttggaggtggaaagtcctgtatctgggtagatgttcttgatggtggaggcaaagagattttagaaaaatttgctgaattttttagcgattcttccatcaagaaggtgaacttttcttcttctatcccttctatgttcttaatcctattactctcctcaacatgcaacacttctcaaatattagttctatgcttgctactttatgaaatatgccttcctagttaagataaatgacaatcagctacaatctgttctgaaattaacctcaggtaatctaaaagtttagtgtcatattatacagagagctttatcgatttttactgtgtgttctgtggtatattcaatttttcaataatatgctaagaataggttgcaacttgcattcctaatgttaagttaatgtgtacctgatttaggatagttggtgcatggttttattgtatagaacagagaagttttcatcttatgatagaagtgaactagcatgatttgttattctattttattttatttgtgtagttgttagatattcttatcttgtagtaatagaaaattaaatctatcttttataaaatcatattggcattaaattcctgggtttgtctatgctcgtgaccagagattacaaaccatatttgaaataaccgagtcactggtgcattctgtaggtctggcataattatagctttgactgtcatgttatagagaattatggattcaaagtttcgggatttcatgctgatacaatgcacatggcacgattatgggattcttcaagacatttggatgggggttattctcttgaaggacttacaggtgacagaagggtcatgtctagggctcagctgaaccatgaaaaggacttgattggtaaggtgtcaatgaaaactatatttagtaagaaaaaattgaaaaaggatggatctgagggtaaaacaagtatcattgctcctgttgaagagctacagagagatgagcgtataccttggatatgttattctgccttagatgctagcagcactttgaagctgtatgagagcctaaagagccatctttcagacatgccctggaaatttgatggtgtgccagtttatgggaaaaccatgtatgatttctacaatgaatattggcgtccatttggtgagcttctagtcatgatggaatctgagggaatgctagttgaccgggcttatcttgaatgcatagaaaaggtggccaaagcagagcaagaggtagctgttaatagattccgcaaatgggccactaggtattgtcctgatgcccagtatatgaatgtgggaagtgattcgcagttgcgccagcttctttttggtggcattgtgaacaggtgcacatttttaaaatcttacgtgtagcatttatttcaatcttaaattaatgatttgctagtcaaagcctgaaatatttatgatattcataagtttaatgtattcactattcatgaatgatggtactactactggtacctaccttgatatttatgaacttttctgtttacaacaaagtagctgaaggatatagatggaagtaaaattttcatttcacttgtcacatgcttcattacagaaaggactccaatcagacgcttccaactgaacggatattcaaaattcccaatgttgataatgtgattgaagaaggtaagaaggctccaaaaaaatttcgtgatataaagttgacgagcctaggttataacctggagactgagatgtacacagcaactggttggccgtcagttagtggtgatgctttaaaggctctggctggaagtatttccgctgattatgacttttttgatgaggattgtaacttggatcttgatgatgaagatgaaaatccttctcaaagtcaagttgcaccggtaaaaattgataaatctgcatatggcacagcctatgcagcttttccaacagagaaagaagggagagaagcttgccatgcaattgctgctttatgtcaagtctgttcaatcaactctttgatctccaacttcatccttcccctgcaggtatttttttattgtttggtttgcaatatgaactttcttgagcttgcttggaatttcttttattttgaaactagtatacaaacttccatactgttcatattgtccgtaataaattgatgatatttttctattttttccctagaaaggatatttttagacaattataattattatataaacatcagtcaatgagatgcttgacaactcacctgtgcaccaaactcacaagtaccacagtaccttgagcttttaaaatactcattggagatggtcaatactaagttctcccactgcttagctatggctagggaaatcatttccttatctgagtttaagctaattttttgaatgcttattgtgccaccacttacattttagaacttttagtaaatatttgtattcttacactgaagctctttatatgtgctctataatagctgcagtttctctttgtcagggacataatatatcaggaaacgatcttcgtgttcattgttccttaaatatcaacacagagacaggacgcttgtcagcaagaaggccaaatctgcaggttattctaattagattaatcagaattctctaatggttttgattaggaattttcattttaatagtagttgttgtgaacttcaaatttttttaagtgctatacatttgagatctgaccattaaccttcatctgtgtgcttgtatgttcactaattggtgtcatacagtttccttgatgctaaactcttagtagatggctttatcattttgtcttttaacctaaaatgtagtttctccttttagtagggtttcttcctattagacatataagtccattttggacctccactctatctttttgctgctgtttttcttaattaaattttggcagtaaggttgaacaaaaaataaaattcagcagaaggtgaaataggtctgtggattatatgtgtttcaaacctgaattattcttgtgtgaggtagcgtgttaaaaatataaaaccctttttaggccgtcatctatcaaatatctcgaggtcaagagtcagttcttgacatctctgctcaaattacattcttttgtattcatttattacttcagttaaaaatatcttattaaaattagtgtttttggactaatcacagccttgctaattgcaatacacatttatgtaatcatttgatgtctacttggtcttgatgccttttctgttactttattacaatgatttggatcctaaatttggactgcacaatgcatctcattcattttcaatttgtattttgacattgacatgtgggtattacatctactagattaatcagaatttcaaaacaatatagaacctaacacatacacttcatgaattagaatcaacctgctctggaaaaggaccgatacaaaatccgtcaagcattcattgctgcacccaggaattctcttatagttgctgattatggacaggttaacagtctatattgtctatctaactgaactattttcaagaaatttcattctgttaactgccttgtttattgttacagctggaacttaggattctggcacaccttgcagactgtaagagcatgttggaagcttttgaagctggtggagatttccattcaaggactgcaatgaatatgtacccacatattcgtaaagcagttgagaaaaaggaagtgcttcttgagtggcatcctcagcctggtgaagataaacccccagttcctcttttgaaggtaactgtccgctgatagaagtaccatttcattgagatgtggaagtagtggctttgtctttagtttggtatttcttgtagctgatgacgtcaaatatagtgaccaccagagtgctggcagatgcatgagggaggactaatccttattctgattggaccgagatccatcaacggcaaatagaataaatataatttattaaaaatcagaacaaatacaaataacttgtgaactttccaatagaaataaaggacagctactgatcattagaacactgtttagggggaaaacatagttgcagtggtagtagaagaattcactgagttttttgatatataatgtgtttaatgatgtttatgtatattaatagaagtaaatcagaatacaccaggcattaataagcttttttagtagtttaacgttatttgatgcccttccctcaagatataaaaaagttgttttagcattttactgttataacttataaccatctaattcatgattgatcatgttttgatttttgttttccttccatgtcaggatgcctttacttctgaaagaagaaaagctaaaatgcttaacttctcaattgcatatgggaagactcctgtggggctttccaaggattggaaggtaccctgaacttttacttattatgagggatttacaaaggtgaaaagtgcccttgatttattatttgattgttcactctcaggtttctgtgaaagaagctaagaaaacagttgacctttggtacaatgatagaaaagaggttttgcaatggcaagaggagcgtaaaaaggaagctcgcgtgttacattgtgtttacacattgctagggagagctcgacggttccctttgatggcccaagctaacacctatcagaaaggtcacattgagcgagctgctattaatactccagtgcaggtccttagctctttctaataaacaaatcaatactgtgtctccctcactcatctatctaactgtctttgcacactctagtaaataaaaaatgtactgaattatttatcttgtgattcttgtctagtttggaacttttcccttttaagaacaatgaatgatgagatcacattttgagagcccacttgtaaaatatcatattccatagtttatattgaaatgatagtccagatagagctgtgaataagaatagagtttgattgtattaacattacaatagtgtcatcttgtattagtctagttagtactgttccctatcaggaatctccttttttgaaatccattattgggtgaaattatatttcctttacatatatttgatagagtgctaattctactctaccactactcctaagaaaacaccattaaagctacaaataaaagctataaagaagataaacataaaattcagatttcattcattgataataataagtaaagatgagtacatttatgtagtcctaaaaatgtcaatcaaggataataattatccaagtgtcaacatcatattattctaacacaaattaaaaaaaaaactataattataaaatacatatttaactccatcctatataatccttggaccatttaattttgggcctagagcccatcctatcattacccaccggttcacattcaaccttgtcctcaaggtttgaaaacaactggaattgagagcaacagcttgttgcaaatgatgagtatgttgcttttgggggcaagaaaataattgtggatgggttttggaaattggtggcagtacatgaaaaaagaaaaggcttatgagacttgttttgatccagtggttggaagggaaatataactttatgagaaagtgcactatgtgggataagggagacacgtggatggtgttgatggttgttaggattttgaaaaaatttggtaagtggagatggtttagggaggatgtacatggcatggttggggtgggattttaacggcttagatgtgtggtaattggatcgttggagatctaagggatggtgatgcaattgagagagtgggagccagctgtgatgtgggagtgcacatgggtgaaaggacacatggtgatctagatgttttattttctaatatgatggacgggtgtgattggggaaggaggttaggttcaattgcaatgagattggatcggtgcggctgggaaatttcccaagcgcaaaacattggttgccttttggtggtgtattgtgattgtggatttggagtgaacggtgaaggggattgtgggtggtgggttggggttgcaaaaattgaaaaggttgatgtggggaaaatagattttgttgcaacacccagcaagtgggtaaggtgatacagagatgcggttggggttggggttggggaaaatgttcatgagtggaacggttgtatgggaaatattgttaaagcaagggtacggagaggagaaactttgttgtggtggaaacagtggcgactgttgcggcggtggttgcgacggcggcgacagtggcggcgattgcggcagtggttgtggtgtctgatgttgaagattgagagcagagagttgcttcatcatgctatgcacggtggaggtgaaagtgtcatgaaaggaatcctgggaccttagatgggtagtgtgctgagatattttattttcttcatagtggttgagttggttctggaaggcatctaatttcggaaaataccttaaaggttgtcttccatggtggttgtggtggatttgggagggggagtaagatgatgaaagcaccattggatagagtgctaattctactctaccactactcctaagaaaacaccattaaacctacaaataaaagctataaagaagaatcataaaattcagatttcattcattgatagtaagtaaagatgagtacatttatatagtccaaaaaatgtgtctttacctaacaacttatagcttttgggattggtttattacaatgcccatagaatttgtaatatattccattagtttgtaaatgtaaagataaatataaatatattattactgaaaatataagaaattatttactattt

(The sequence listing continues in the following parts.)
